(19) United States
(12) Patent Application Publication
(10) Pub. No.: US 2024/0016839 A1
(43) Pub. Date: Jan. 18, 2024

(54) BICISTRONIC INHIBITORY CHIMERIC ANTIGEN RECEPTOR (ICAR)/ACTIVATING CHIMERIC ANTIGEN RECEPTOR (ACAR) CONSTRUCTS FOR USE IN CANCER THERAPIES

(71) Applicant: ImmPACT BIO USA Inc., Camarillo, CA (US)

(72) Inventors: Rick Kendall, Camarillo, CA (US); Frank Calzone, Camarillo, CA (US); Orit Foord, Camarillo, CA (US); Gregor B. Adams, Camarillo, CA (US); Tanya Kim, Camarillo, CA (US); David Bassan, Camarillo, CA (US); Jason Yi, Camarillo, CA (US); Adi Sharbi-Yunger, Camarillo, CA (US)

(21) Appl. No.: 18/044,075

(22) PCT Filed: Sep. 7, 2021
(86) PCT No.: PCT/US2021/049315

§ 371 Date: Mar. 3, 2023

Related U.S. Application Data
(60) Provisional application No. 63/178,452, filed on Apr. 22, 2021.
(60) Provisional application No. 63/074,812, filed on Sep. 4, 2020.

(51) Int. Cl. A61K 35/17; A61K 39/00; C07K 14/725

(52) U.S. Cl. CPC A61K 35/17; A61K 39/4644; A61K 39/4631; C07K 14/7051; A61K 2039/5156; A61K 2039/5158; C07K 2317/622

(57) ABSTRACT

The invention relates to the field of cancer immunotherapy by employing bicistronic inhibitory chimeric antigen receptor (iCAR)/activating chimeric antigen receptor (aCAR) constructs for use in cancer treatment therapies.

### CROSS-REFERENCE TO RELATED APPLICATIONS

[0001] This application is a U.S. National Stage Application under 35 U.S.C. § 371 which claims the benefit of priority to International Application No. PCT/US2021/049315, filed Sep. 7, 2021, which claims priority under 35 U.S.C. § 119 to U.S. Patent Application Nos. 63/178,452, filed on Apr. 22, 2021, and 63/074,812, filed on Sep. 4, 2020, both of which are expressly incorporated herein by reference in their entireties.

### SEQUENCE LISTING

[0002] A Sequence Listing is being submitted electronically via EFS in the form of a text file, created Mar. 1, 2023, and named “194110560_1.txt” (690,086 bytes), the contents of which are incorporated herein by reference in their entirety.

### FIELD OF THE INVENTION

[0003] The invention relates to the field of cancer immunotherapy by employing inhibitory chimeric antigen receptors (iCARs) paired with activating chimeric antigen receptors (aCARs) for use in cancer treatment therapies.

### BACKGROUND OF THE INVENTION

[0004] The identification of targetable antigens that are exclusively expressed by tumor cells but not by healthy tissue is undoubtedly the major challenge in cancer immunotherapy today. Clinical evidence that T cells are capable of eradicating tumor cells comes from numerous studies evaluating highly diverse approaches for harnessing T cells to treat cancer (Rosenberg and Restifo, Science, 348(6230): 62-68 (2015)). These approaches employ bone marrow transplantation with donor lymphocyte infusion, adoptive transfer of tumor-infiltrating lymphocytes (TILs), treatment with T cells genetically redirected at pre-selected antigens via CARs (Gross and Eshhar, Annual Review of Pharmacology and Toxicology, 56:59-83, (2016)) or T cell receptors (TCRs), the use of immune checkpoint inhibitors, BiTEs (bispecific T-cell engager molecules) technologies; Einsele, H., et al., Cancer, 126(14):3192-3201 (2020)), or active vaccination. Of these, the use of genetically engineered T cells and different strategies for active immunization entail pre-existing information on candidate antigens which are likely to exert a durable clinical response but minimal adverse effects. Yet, as stated in the title of a review by S. Rosenberg, “Finding suitable targets is the major obstacle to cancer gene therapy” (Rosenberg, Cancer Gene Therapy, 21:45-47 (2014))).

[0005] The concept of using chimeric antigen receptors (or CARs) to genetically redirect T cells (or other killer cells of the immune system such as natural killer (NK) cells and cytokine-induced killer cells) against antigens of choice in an MHC-independent manner was first introduced by Gross and Eshhar in the late 1980s (Gross et al., PNAS, 86(24):10024-1002 (1989). They are produced synthetically from chimeric genes encoding an extracellular single-chain antibody variable fragment (scFv) fused through a flexible hinge and transmembrane domain to costimulatory domains and signaling components comprising immunoreceptor tyrosine-based activation motifs of CD3-ζ or FcRγ chains capable of T cell activation. At present, CARs are being examined in dozens of clinical trials and have shown exceptionally high efficacy in B cell malignancies (Dotti et al., 2014; Gill and June, 263(1): 68-89 (2015)); Gross and Eshhar, Annual Review of Pharmacology and Toxicology, 56:59-83, 2016). The safety of CAR-T cell therapy is determined, in large part, by its ability to discriminate between the tumor and healthy tissue. A major risk in targeting solid tumors, and the direct cause for adverse autoimmune effects that have been reported in clinical and preclinical studies, is off-tumor, on-target toxicity resulting from extra-tumor expression of the target antigen (dealt with in detail in the review (Gross and Eshhar, 2016b) and (Klebanoff, et al., Nature Medicine 22:26-36 (2016)).

[0006] While undoubtedly intriguing, these previous CAR-based approaches require tuning the affinity of CAR scFv's to selectively bind high antigen levels in tumors while minimizing recognition of lower antigen levels in healthy tissues. In addition, the magnitude of both the activating and costimulatory signals needs to be balanced to allow effective on-target, on-tumor T cell reactivity. It is worth noting that in B cell malignancies, CARs targeted antigen exclusive to B cells and did not require titration of affinity or T cell signaling. For solid tumors, whether such balance can be routinely attained in the clinical setting is questionable.

[0007] Off-tumor reactivity occurs when the tumor antigen targeted by CAR-redirected killer cells is shared with normal tissue. However, if the normal tissue expresses another surface antigen that is not present on the tumor, it can be targeted by inhibitory CARs (iCARs) that contains an inhibitory signaling moiety which when engaged prevents T-cell activation by the activating CAR (aCAR). Co-expression of aCAR and iCAR will therefore direct killer cells to target tumors while sparing normal tissue.

[0008] Instead of an activating domain (such as FcRγ or CD3-ζ), an iCAR possesses a signaling domain derived from an inhibitory receptor which can antagonize T cell activation, such as CTLA-4, PD-1, or NK inhibitory receptors.

[0009] There remains a need in the art for cancer therapies, in particular therapies that comprise iCARs in order to limit off-target effects. The present invention meets that need by providing either co-transduction of monocistronic aCAR and iCAR constructs, or bicistronic constructs comprising such iCARs and which find use in cancer treatment.

### BRIEF SUMMARY OF THE INVENTION

[0010] The present invention provides bicistronic iCAR/aCAR constructs or monocistronic aCAR and iCAR constructs for co-transduction and uses thereof.

[0011] The present invention provides a bicistronic iCAR/aCAR construct or monocistronic aCAR and iCAR constructs for co-transduction comprising:
[0012] 1. an iCAR portion, wherein the iCAR portion comprises:
[0013] 2. an iCAR single chain variable fragment (scFv) component optionally in the VH-VL or VL-VH orientation;
[0014] 3. an iCAR hinge domain component;
[0015] 4. an iCAR transmembrane (TM) domain component;
[0016] 5. an iCAR inhibitory domain component; and
[0017] 6. an aCAR portion, wherein the iCAR portion comprises:
[0018] 7. an aCAR single chain variable fragment (scFv) component optionally in the VH-VL or VL-VH orientation;
[0019] 8. an aCAR hinge domain component;
[0020] 9. an aCAR co-stimulatory domain component an aCAR activation signaling domain; and
[0021] 11. a linker that connects the iCAR portion in (i) and the aCAR portion in (ii).

[0022] In some embodiments of the bicistronic iCAR/aCAR construct or monocistronic aCAR and iCAR constructs for co-transduction, the linker connecting the VH-VL or VL-VH in either orientation comprises one or more linker selected from the group consisting of (G4S)X3 linker

[0023] (SEQ ID NO:81), G4S (SEQ ID NO:153), (G4S)X3 (SEQ ID NO:154), and Whitlow linker (SEQ ID NO:82).

[0024] In some embodiments of the bicistronic iCAR/aCAR construct or monocistronic aCAR and iCAR constructs for co-transduction, the iCAR scFv component targets an HLA antigen.

[0025] In some embodiments of the bicistronic iCAR/aCAR construct or monocistronic aCAR and iCAR constructs for co-transduction, the HLA antigen is selected from the group consisting of HLA-A2, HLA-A3, HLA-A, HLA-B, HLA-C, HLA-G, HLA-E, HLA-F, HLA-DPA1, HLA-DQA1, HLA-DQB1, HLA-DQB2, HLA-DRB1, and HLA-DRB5.

[0026] In some embodiments of the bicistronic iCAR/aCAR construct or monocistronic aCAR and iCAR constructs for co-transduction, the iCAR scFv component is selected from the group consisting of BB7.2, 3PF12, 3PF12/C4, 3PF12/F12, 3PF12/B11, W6/32, BBM.1, SN66E3, Ha5C2.A2, MWB1, MWB1-mod, Hz.BB7.2 VH1-69_A18VK, Hz.BB7.2 VH1-69 (27,30)_A18, Hz.BB7.2 VH1-69 (27,30,48)_A18, Hz.BB7.2 VH1-69 (27,30,67)_A18, Hz.BB7.2 VH1-69 (27,30,69)_A18, Hz.BB7.2 VH1-69 (27,30,67,69)_A18, Hz.BB7.2 VH1-3_A18, Hz.BB7.2 VH1-3(48)_A18, Hz.BB7.2 VH1-3(67)_A18, Hz.BB7.2 VH1-3(69)_A18, Hz.BB7.2 VH1-3(71)_A18, Hz.BB7.2 VH1-3(73)_A18, MWB1.2, SN66E3.2 and SN66E3.3.

[0027] In some embodiments of the bicistronic iCAR/aCAR construct or monocistronic aCAR and iCAR constructs for co-transduction, the iCAR scFv component is BB7.2.

[0028] In some embodiments of the bicistronic iCAR/aCAR construct or monocistronic aCAR and iCAR constructs for co-transduction, the iCAR scFv comprises the Vh and Vl from BB7.2 (SEQ ID NOs: 37 and 38) or vhCDR1, vhCDR2, vhCDR3, vlCDR1, vlCDR2, and vlCDR3 from SEQ ID NOs: 37 and 38.

[0029] In some embodiments of the bicistronic iCAR/aCAR construct or monocistronic aCAR and iCAR constructs for co-transduction, the iCAR scFv comprises the Vh and Vl from Hz.BB7.2 VH1-69_A18VK (SEQ ID NOs: 57 and 58) or vhCDR1, vhCDR2, vhCDR3, vlCDR1, vlCDR2, and vlCDR3 from SEQ ID NOs: 57 and 58.

[0030] In some embodiments of the bicistronic iCAR/aCAR construct or monocistronic aCAR and iCAR constructs for co-transduction, wherein the iCAR scFv comprises the Vh and Vl from Hz.BB7.2 VH1-69 (27,30) A18 (SEQ ID NOs: 59 and 60) or vhCDR1, vhCDR2, vhCDR3, vlCDR1, vlCDR2, and vlCDR3 from SEQ ID NOs: 59 and 60.

[0031] In some embodiments of the bicistronic iCAR/aCAR construct or monocistronic aCAR and iCAR constructs for co-transduction, the iCAR scFv comprises the Vh and Vl from Hz.BB7.2 VH1-69 (27,30,48) A18 (SEQ ID NOs: 61 and 62) or vhCDR1, vhCDR2, vhCDR3, vlCDR1, vlCDR2, and vlCDR3 from SEQ ID NOs: 61 and 62.

[0032] In some embodiments of the bicistronic iCAR/aCAR construct or monocistronic aCAR and iCAR constructs for co-transduction, the iCAR scFv comprises the Vh and Vl from Hz.BB7.2 VH1-69 (27,30,67) A18 (SEQ ID NOs: 63 and 64) or vhCDR1, vhCDR2, vhCDR3, vlCDR1, vlCDR2, and vlCDR3 from SEQ ID NOs: 63 and 64.

[0033] In some embodiments of the bicistronic iCAR/aCAR construct or monocistronic aCAR and iCAR constructs for co-transduction, the iCAR scFv comprises the Vh and Vl from Hz.BB7.2 VH1-69 (27,30,69) A18 (SEQ ID NOs: 65 and 66) or vhCDR1, vhCDR2, vhCDR3, vlCDR1, vlCDR2, and vlCDR3 from SEQ ID NOs: 65 and 66.

[0034] In some embodiments of the bicistronic iCAR/aCAR construct or monocistronic aCAR and iCAR constructs for co-transduction, the iCAR scFv comprises the Vh and Vl from Hz.BB7.2 VH1-69 (27,30,67,69) A18 (SEQ ID NOs: 67 and 68) or vhCDR1, vhCDR2, vhCDR3, vlCDR1, vlCDR2, and vlCDR3 from SEQ ID NOs: 67 and 68.

[0035] In some embodiments of the bicistronic iCAR/aCAR construct or monocistronic aCAR and iCAR constructs for co-transduction, the iCAR scFv comprises the Vh and Vl from Hz.BB7.2 VH1-3_A18 (SEQ ID NOs: 69 and 70) or vhCDR1, vhCDR2, vhCDR3, vlCDR1, vlCDR2, and vlCDR3 from SEQ ID NOs: 69 and 70.

[0036] In some embodiments of the bicistronic iCAR/aCAR construct or monocistronic aCAR and iCAR constructs for co-transduction, the iCAR scFv comprises the Vh and Vl from Hz.BB7.2 VH1-3(48) A18 (SEQ ID NOs: 71 and 72) or vhCDR1, vhCDR2, vhCDR3, vlCDR1, vlCDR2, and vlCDR3 from SEQ ID NOs: 71 and 72.

[0037] In some embodiments of the bicistronic iCAR/aCAR construct or monocistronic aCAR and iCAR constructs for co-transduction, the iCAR scFv comprises the Vh and Vl from Hz.BB7.2 VH1-3(67) A18 (SEQ ID NOs: 73 and 74) or vhCDR1, vhCDR2, vhCDR3, vlCDR1, vlCDR2, and vlCDR3 from SEQ ID NOs: 73 and 74.

[0038] In some embodiments of the bicistronic iCAR/aCAR construct or monocistronic aCAR and iCAR constructs for co-transduction, the iCAR scFv comprises the Vh and Vl from Hz.BB7.2 VH1-3(69) A18 (SEQ ID NOs: 75 and 76) or vhCDR1, vhCDR2, vhCDR3, vlCDR1, vlCDR2, and vlCDR3 from SEQ ID NOs: 75 and 76.

[0039] In some embodiments of the bicistronic iCAR/aCAR construct or monocistronic aCAR and iCAR constructs for co-transduction, the iCAR scFv comprises the Vh and Vl from Hz.BB7.2 VH1-3(71) A18 (SEQ ID NOs: 77 and 78) or vhCDR1, vhCDR2, vhCDR3, vlCDR1, vlCDR2, and vlCDR3 from SEQ ID NOs: 77 and 78.

[0040] In some embodiments of the bicistronic iCAR/aCAR construct or monocistronic aCAR and iCAR constructs for co-transduction, the iCAR scFv comprises the Vh and Vl from Hz.BB7.2 VH1-3(73) A18 (SEQ ID NOs: 79 and 80) or vhCDR1, vhCDR2, vhCDR3, vlCDR1, vlCDR2, and vlCDR3 from SEQ ID NOs: 79 and 80.

[0041] In some embodiments of the bicistronic iCAR/aCAR construct or monocistronic aCAR and iCAR constructs for co-transduction, the iCAR scFv is BB7.2 of SEQ ID NO:167.

[0042] In some embodiments of the bicistronic iCAR/aCAR construct or monocistronic aCAR and iCAR constructs for co-transduction, the iCAR scFv component is 3PF12.

[0043] In some embodiments of the bicistronic iCAR/aCAR construct or monocistronic aCAR and iCAR constructs for co-transduction, the iCAR scFv comprises the Vh and Vl from 3PF12/C4 (SEQ ID NOs: 39 and 40) or vhCDR1, vhCDR2, vhCDR3, vlCDR1, vlCDR2, and vlCDR3 from SEQ ID NOs: 39 and 40.

[0044] In some embodiments of the bicistronic iCAR/aCAR construct or monocistronic aCAR and iCAR constructs for co-transduction, the iCAR scFv comprises the Vh and Vl from 3PF12/F12 (SEQ ID NOs: 41 and 42) or vhCDR1, vhCDR2, vhCDR3, vlCDR1, vlCDR2, and vlCDR3 from SEQ ID NOs: 41 and 42.

[0045] In some embodiments of the bicistronic iCAR/aCAR construct or monocistronic aCAR and iCAR constructs for co-transduction, wherein the iCAR scFv comprises the Vh and Vl from 3PF12/B11 (SEQ ID NOs: 43 and 44) or vhCDR1, vhCDR2, vhCDR3, vlCDR1, vlCDR2, and vlCDR3 from SEQ ID NOs: 43 and 44.

[0046] In some embodiments of the bicistronic iCAR/aCAR construct or monocistronic aCAR and iCAR constructs for co-transduction, the iCAR scFv is 3PF12 of SEQ ID NO:168.

[0047] In some embodiments of the bicistronic iCAR/aCAR construct or monocistronic aCAR and iCAR constructs for co-transduction, the iCAR scFv component is SN66E3.

[0048] In some embodiments of the bicistronic iCAR/aCAR construct or monocistronic aCAR and iCAR constructs for co-transduction, the iCAR scFv comprises the Vh and Vl from SN66E3.1 (SEQ ID NOs: 49 and 50) or vhCDR1, vhCDR2, vhCDR3, vlCDR1, vlCDR2, and vlCDR3 from SEQ ID NOs: 49 and 50.

[0049] In some embodiments of the bicistronic iCAR/aCAR construct or monocistronic aCAR and iCAR constructs for co-transduction, the iCAR scFv is SN66E3.1 of SEQ ID NO:169.

[0050] In some embodiments of the bicistronic iCAR/aCAR construct or monocistronic aCAR and iCAR constructs for co-transduction, the iCAR scFv comprises the Vh and Vl from SN66E3.2 (SEQ ID NOs: 165 and 166) or vhCDR1, vhCDR2, vhCDR3, vlCDR1, vlCDR2, and vlCDR3 from SEQ ID NOs: 165 and 166.

[0051] In some embodiments of the bicistronic iCAR/aCAR construct or monocistronic aCAR and iCAR constructs for co-transduction, the iCAR scFv is SN66E3.2 of SEQ ID NO:285.

[0052] In some embodiments of the bicistronic iCAR/aCAR construct or monocistronic aCAR and iCAR constructs for co-transduction, the iCAR scFv comprises the Vh and Vl from SN66E3.3 (SEQ ID NOs: 283 and 284) or vhCDR1, vhCDR2, vhCDR3, vlCDR1, vlCDR2, and vlCDR3 from SEQ ID NOs: 283 and 284.

[0053] In some embodiments of the bicistronic iCAR/aCAR construct or monocistronic aCAR and iCAR constructs for co-transduction, the iCAR scFv is SN66E3.3 of SEQ ID NO:286.

[0054] In some embodiments of the bicistronic iCAR/aCAR construct or monocistronic aCAR and iCAR constructs for co-transduction, the iCAR scFv component is W6/32.

[0055] In some embodiments of the bicistronic iCAR/aCAR construct or monocistronic aCAR and iCAR constructs for co-transduction, the iCAR scFv comprises the Vh and Vl from W6/32 (SEQ ID NOs: 45 and 46) or vhCDR1, vhCDR2, vhCDR3, vlCDR1, vlCDR2, and vlCDR3 from SEQ ID NOs: 45 and 46.

[0056] In some embodiments of the bicistronic iCAR/aCAR construct or monocistronic aCAR and iCAR constructs for co-transduction, the iCAR scFv component is BBM.1.

[0057] In some embodiments of the bicistronic iCAR/aCAR construct or monocistronic aCAR and iCAR constructs for co-transduction, the iCAR scFv comprises the Vh and Vl from BBM.1 (SEQ ID NOs: 47 and 48) or vhCDR1, vhCDR2, vhCDR3, vlCDR1, vlCDR2, and vlCDR3 from SEQ ID NOs: 47 and 48.

[0058] In some embodiments of the bicistronic iCAR/aCAR construct or monocistronic aCAR and iCAR constructs for co-transduction, the iCAR scFv component is Ha5C2.A2.

[0059] In some embodiments of the bicistronic iCAR/aCAR construct or monocistronic aCAR and iCAR constructs for co-transduction, the iCAR scFv comprises the Vh and Vl from Ha5C2.A2 (SEQ ID NOs: 51 and 52) or vhCDR1, vhCDR2, vhCDR3, vlCDR1, vlCDR2, and vlCDR3 from SEQ ID NOs: 51 and 52.

[0060] T In some embodiments of the bicistronic iCAR/aCAR construct or monocistronic aCAR and iCAR constructs for co-transduction, the iCAR scFv component is MWB1.

[0061] In some embodiments of the bicistronic iCAR/aCAR construct or monocistronic aCAR and iCAR constructs for co-transduction, the iCAR scFv comprises the Vh and Vl from MWB1 (SEQ ID NOs: 53 and 54) or vhCDR1, vhCDR2, vhCDR3, vlCDR1, vlCDR2, and vlCDR3 from SEQ ID NOs: 53 and 54.

[0062] In some embodiments of the bicistronic iCAR/aCAR construct or monocistronic aCAR and iCAR constructs for co-transduction, the iCAR scFv comprises the Vh and Vl from MWB1-mod (MWB1.1) (SEQ ID NOs: 55 and 56) or vhCDR1, vhCDR2, vhCDR3, vlCDR1, vlCDR2, and vlCDR3 from SEQ ID NOs: 55 and 56.

[0063] In some embodiments of the bicistronic iCAR/aCAR construct or monocistronic aCAR and iCAR constructs for co-transduction, the iCAR scFv comprises the Vh and Vl from MWB1.2 (SEQ ID NOs: 163 and 164).

[0064] In some embodiments of the bicistronic iCAR/aCAR construct or monocistronic aCAR and iCAR constructs for co-transduction, the iCAR scFv is MWB1.1 scFvVH_VL (SEQ ID NO:273).

[0065] In some embodiments of the bicistronic iCAR/aCAR construct or monocistronic aCAR and iCAR constructs for co-transduction, the iCAR scFv is MWB1.2 scFvVH_VL (SEQ ID NO:274).

[0066] In some embodiments of the bicistronic iCAR/aCAR construct or monocistronic aCAR and iCAR constructs for co-transduction, the iCAR hinge domain component is selected from a PD-1 hinge, a CD28 hinge, and a CD8 hinge (including a CD8a hinge), a LIR1 Ig3-4 hinge, a LIR1 Ig-4 hinge, a LIR1 52 aa hinge, a LIR1 36 aa hinge, a LIR1 30 aa hinge, a LIR1 26 aa hinge, a LIR1 8 aa hinge, a CD33 hinge, a KIR2DL1 hinge, a PD-1 (47) hinge, a PD-1 (42) hinge, a PD-1 (36) hinge, a PD-1 (30) hinge, a PD-1 (26) hinge, and a PD-1 (20) hinge.

[0067] In some embodiments of the bicistronic iCAR/aCAR construct or monocistronic aCAR and iCAR constructs for co-transduction, the iCAR hinge domain component is a PD-1 hinge (SEQ ID NO: 86).

[0068] In some embodiments of the bicistronic iCAR/aCAR construct or monocistronic aCAR and iCAR constructs for co-transduction, the iCAR hinge domain component is a CD28 hinge (SEQ ID NO: 85).

[0069] In some embodiments of the bicistronic iCAR/aCAR construct or monocistronic aCAR and iCAR constructs for co-transduction, the iCAR hinge domain component is a CD8 alpha hinge (SEQ ID NO: 84).

[0070] In some embodiments of the bicistronic iCAR/aCAR construct or monocistronic aCAR and iCAR constructs for co-transduction, the iCAR hinge domain component is a LIR1 Ig3-4 hinge (SEQ ID NO: 87).

[0071] In some embodiments of the bicistronic iCAR/aCAR construct or monocistronic aCAR and iCAR constructs for co-transduction, the iCAR hinge domain component is a LIR1 Ig-4 hinge (SEQ ID NO: 88).

[0072] In some embodiments of the bicistronic iCAR/aCAR construct or monocistronic aCAR and iCAR constructs for co-transduction, the iCAR hinge domain component is a LIR1 52 aa hinge (SEQ ID NO: 89).

[0073] In some embodiments of the bicistronic iCAR/aCAR construct or monocistronic aCAR and iCAR constructs for co-transduction, the iCAR hinge domain component is a LIR1 36 aa hinge (SEQ ID NO: 90).

[0074] In some embodiments of the bicistronic iCAR/aCAR construct or monocistronic aCAR and iCAR constructs for co-transduction, the iCAR hinge domain component is a LIR1 30 aa hinge (SEQ ID NO: 91).

[0075] In some embodiments of the bicistronic iCAR/aCAR construct or monocistronic aCAR and iCAR constructs for co-transduction, the iCAR hinge domain component is a LIR1 26 aa hinge (SEQ ID NO: 289).

[0076] In some embodiments of the bicistronic iCAR/aCAR construct or monocistronic aCAR and iCAR constructs for co-transduction, the iCAR hinge domain component is a LIR1 8 aa hinge (SEQ ID NO:92).

[0077] In some embodiments of the bicistronic iCAR/aCAR construct or monocistronic aCAR and iCAR constructs for co-transduction, the iCAR hinge domain component is a CD33 hinge (SEQ ID NO: 93).

[0078] In some embodiments of the bicistronic iCAR/aCAR construct or monocistronic aCAR and iCAR constructs for co-transduction, the iCAR hinge domain component is a KIR2DL1 hinge (SEQ ID NO: 94).

[0079] In some embodiments of the bicistronic iCAR/aCAR construct or monocistronic aCAR and iCAR constructs for co-transduction, the iCAR hinge domain component is a PD-1 (47) hinge (SEQ ID NO: 290).

[0080] In some embodiments of the bicistronic iCAR/aCAR construct or monocistronic aCAR and iCAR constructs for co-transduction, the iCAR hinge domain component is a PD-1 (42) hinge (SEQ ID NO: 291).

[0081] In some embodiments of the bicistronic iCAR/aCAR construct or monocistronic aCAR and iCAR constructs for co-transduction, the iCAR hinge domain component is a PD-1 (36) hinge (SEQ ID NO: 292).

[0082] In some embodiments of the bicistronic iCAR/aCAR construct or monocistronic aCAR and iCAR constructs for co-transduction, the iCAR hinge domain component is a PD-1 (30) hinge (SEQ ID NO: 293).

[0083] In some embodiments of the bicistronic iCAR/aCAR construct or monocistronic aCAR and iCAR constructs for co-transduction, the iCAR hinge domain component is a PD-1 (26) hinge (SEQ ID NO: 294).

[0084] In some embodiments of the bicistronic iCAR/aCAR construct or monocistronic aCAR and iCAR constructs for co-transduction, the iCAR hinge domain component is a PD-1 (20) hinge (SEQ ID NO: 295).

[0085] In some embodiments of the bicistronic iCAR/aCAR construct or monocistronic aCAR and iCAR constructs for co-transduction, the iCAR TM domain component is selected from a PD-1 TM domain, a CD28 TM domain, a CD8 TM domain (including a CD8a TM domain), a LIR1 TM domain, a CD33 TM domain, and a KIR2DL1 TM domain.

[0086] In some embodiments of the bicistronic iCAR/aCAR construct or monocistronic aCAR and iCAR constructs for co-transduction, the iCAR TM domain component is a PD-1 TM domain (SEQ ID NO:97).

[0087] In some embodiments of the bicistronic iCAR/aCAR construct or monocistronic aCAR and iCAR constructs for co-transduction, the iCAR TM domain component is a CD28 TM domain (SEQ ID NO:96).

[0088] In some embodiments of the bicistronic iCAR/aCAR construct or monocistronic aCAR and iCAR constructs for co-transduction, the iCAR TM domain component is a CD8 alpha TM domain (SEQ ID NO:95).

[0089] In some embodiments of the bicistronic iCAR/aCAR construct or monocistronic aCAR and iCAR constructs for co-transduction, the iCAR TM domain component is a LIR1 TM domain (SEQ ID NO:98).

[0090] In some embodiments of the bicistronic iCAR/aCAR construct or monocistronic aCAR and iCAR constructs for co-transduction, the iCAR TM domain component is a CD33 TM domain (SEQ ID NO:99).

[0091] In some embodiments of the bicistronic iCAR/aCAR construct or monocistronic aCAR and iCAR constructs for co-transduction, the iCAR TM domain component is a KIR2DL1 TM domain (SEQ ID NO:100).

[0092] In some embodiments of the bicistronic iCAR/aCAR construct or monocistronic aCAR and iCAR constructs for co-transduction, the iCAR inhibitory domain component is an inhibitory domain from a protein selected from the group consisting of PD-1, KIR2DL1, KIR2DL2, KIR2DL3, KIR2DL4, KIR2DL5A, KIR3DL1, KIR3DL2, KIR3DL3, LAIR1, CD22, CD33, SIGLEC5, SIGLEC6, SIGLEC7, SIGLEC8, SIGLEC9, SIGLEC10, SIGLEC11, SIGLEC12, PECAM1/CD31, CD200R1, FCRL1, FCRL2, FCRL3, FCRL4, FCRL5, SLAMF1, SLAMF5, BTLA, LAG3, 2B4, CD160, CEACAM1, TIM3, VISTA, TIGIT, SIRPalpha, FcγRIIB, CD5, CD300a, CD300f, LIR1, LIR2, LIR3, LIR5, LIRE, Ly9, 2xPD1(G4S), 2xPD1(PD1), PVRIg, and AA2AR.

[0093] In some embodiments of the bicistronic iCAR/aCAR construct or monocistronic aCAR and iCAR constructs for co-transduction, the iCAR inhibitory domain component is a PD-1 inhibitory domain (SEQ ID NO:101).

[0094] In some embodiments of the bicistronic iCAR/aCAR construct or monocistronic aCAR and iCAR constructs for co-transduction, the iCAR component is a KIR2DL1 inhibitory domain (SEQ ID NO:102).

[0095] In some embodiments of the bicistronic iCAR/aCAR construct or monocistronic aCAR and iCAR constructs for co-transduction, the iCAR component is a KIR2DL2 inhibitory domain (SEQ ID NO:103).

[0096] In some embodiments of the bicistronic iCAR/aCAR construct or monocistronic aCAR and iCAR constructs for co-transduction, the iCAR component is a KIR2DL3 inhibitory domain (SEQ ID NO:104).

[0097] In some embodiments of the bicistronic iCAR/aCAR construct or monocistronic aCAR and iCAR constructs for co-transduction, the iCAR inhibitory domain component is a KIR2DL4 inhibitory domain (SEQ ID NO:105).

[0098] In some embodiments of the bicistronic iCAR/aCAR construct or monocistronic aCAR and iCAR constructs for co-transduction, the iCAR inhibitory domain component is a KIR2DL5A inhibitory domain (SEQ ID NO:106).

[0099] In some embodiments of the bicistronic iCAR/aCAR construct or monocistronic aCAR and iCAR constructs for co-transduction, the iCAR inhibitory domain component is a KIR3DL1 inhibitory domain (SEQ ID NO:107).

[0100] In some embodiments of the bicistronic iCAR/aCAR construct or monocistronic aCAR and iCAR constructs for co-transduction, the iCAR inhibitory domain component is a KIR3DL2 inhibitory domain (SEQ ID NO:108).

[0101] In some embodiments of the bicistronic iCAR/aCAR construct or monocistronic aCAR and iCAR constructs for co-transduction, the iCAR inhibitory domain component is a KIR3DL3 inhibitory domain (SEQ ID NO:109).

[0102] In some embodiments of the bicistronic iCAR/aCAR construct or monocistronic aCAR and iCAR constructs for co-transduction, the iCAR inhibitory domain component is a LAIR1 inhibitory domain (SEQ ID NO:110).

[0103] In some embodiments of the bicistronic iCAR/aCAR construct or monocistronic aCAR and iCAR constructs for co-transduction, the iCAR inhibitory domain component is a CD22 inhibitory domain (SEQ ID NO:111).

[0104] In some embodiments of the bicistronic iCAR/aCAR construct or monocistronic aCAR and iCAR constructs for co-transduction, the iCAR inhibitory domain component is a CD33 inhibitory domain (SEQ ID NO:112).

[0105] In some embodiments of the bicistronic iCAR/aCAR construct or monocistronic aCAR and iCAR constructs for co-transduction, the iCAR inhibitory domain component is a SIGLEC5 inhibitory domain (SEQ ID NO:113).

[0106] In some embodiments of the bicistronic iCAR/aCAR construct or monocistronic aCAR and iCAR constructs for co-transduction, the iCAR inhibitory domain component is a SIGLEC6 inhibitory domain (SEQ ID NO:114).

[0107] In some embodiments of the bicistronic iCAR/aCAR construct or monocistronic aCAR and iCAR constructs for co-transduction, the iCAR inhibitory domain component is a SIGLEC7 inhibitory domain (SEQ ID NO:115).

[0108] In some embodiments of the bicistronic iCAR/aCAR construct or monocistronic aCAR and iCAR constructs for co-transduction, the iCAR inhibitory domain component is a SIGLEC8 inhibitory domain (SEQ ID NO:116).

[0109] In some embodiments of the bicistronic iCAR/aCAR construct or monocistronic aCAR and iCAR constructs for co-transduction, the iCAR inhibitory domain component is a SIGLEC9 inhibitory domain (SEQ ID NO:117).

[0110] In some embodiments of the bicistronic iCAR/aCAR construct or monocistronic aCAR and iCAR constructs for co-transduction, the iCAR inhibitory domain component is a SIGLEC10inhibitory domain (SEQ ID NO:118).

[0111] In some embodiments of the bicistronic iCAR/aCAR construct or monocistronic aCAR and iCAR constructs for co-transduction, the iCAR inhibitory domain component is a SIGLEC11inhibitory domain (SEQ ID NO:119).

[0112] In some embodiments of the bicistronic iCAR/aCAR construct or monocistronic aCAR and iCAR constructs for co-transduction, the iCAR inhibitory domain component is a SIGLEC12inhibitory domain (SEQ ID NO:120).

[0113] In some embodiments of the bicistronic iCAR/aCAR construct or monocistronic aCAR and iCAR constructs for co-transduction, the iCAR inhibitory domain component is a PECAM1/CD31 inhibitory domain (SEQ ID NO:121).

[0114] In some embodiments of the bicistronic iCAR/aCAR construct or monocistronic aCAR and iCAR constructs for co-transduction, the iCAR inhibitory domain component is a CD200R1inhibitory domain (SEQ ID NO:122).

[0115] In some embodiments of the bicistronic iCAR/aCAR construct or monocistronic aCAR and iCAR constructs for co-transduction, the iCAR inhibitory domain component is a FCRL1inhibitory domain (SEQ ID NO:123).

[0116] In some embodiments of the bicistronic iCAR/aCAR construct or monocistronic aCAR and iCAR constructs for co-transduction, the iCAR inhibitory domain component is a FCRL2inhibitory domain (SEQ ID NO:124).

[0117] In some embodiments of the bicistronic iCAR/aCAR construct or monocistronic aCAR and iCAR constructs for co-transduction, the iCAR inhibitory domain component is a FCRL3inhibitory domain (SEQ ID NO:125).

[0118] In some embodiments of the bicistronic iCAR/aCAR construct or monocistronic aCAR and iCAR constructs for co-transduction, the iCAR inhibitory domain component is a FCRL4 inhibitory domain (SEQ ID NO:126).

[0119] In some embodiments of the bicistronic iCAR/aCAR construct or monocistronic aCAR and iCAR constructs for co-transduction, the iCAR inhibitory domain component is a FCRL5 inhibitory domain (SEQ ID NO:127).

[0120] In some embodiments of the bicistronic iCAR/aCAR construct or monocistronic aCAR and iCAR constructs for co-transduction, the iCAR inhibitory domain component is a SLAMF1 inhibitory domain (SEQ ID NO:128).

[0121] In some embodiments of the bicistronic iCAR/aCAR construct or monocistronic aCAR and iCAR constructs for co-transduction, the iCAR inhibitory domain component is a SLAMF5 inhibitory domain (SEQ ID NO:129).

[0122] In some embodiments of the bicistronic iCAR/aCAR construct or monocistronic aCAR and iCAR constructs for co-transduction, the iCAR inhibitory domain component is a BTLA inhibitory domain (SEQ ID NO:130).

[0123] In some embodiments of the bicistronic iCAR/aCAR construct or monocistronic aCAR and iCAR constructs for co-transduction, the iCAR inhibitory domain component is a LAG3 inhibitory domain (SEQ ID NO:131).

[0124] In some embodiments of the bicistronic iCAR/aCAR construct or monocistronic aCAR and iCAR constructs for co-transduction, the iCAR inhibitory domain component is a 2B4 inhibitory domain (SEQ ID NO:132).

[0125] In some embodiments of the bicistronic iCAR/aCAR construct or monocistronic aCAR and iCAR constructs for co-transduction, the iCAR inhibitory domain component is a CD160 inhibitory domain (SEQ ID NO:133).

[0126] In some embodiments of the bicistronic iCAR/aCAR construct or monocistronic aCAR and iCAR constructs for co-transduction, the iCAR inhibitory domain component is a CEACAM1 inhibitory domain (SEQ ID NO:134).

[0127] In some embodiments of the bicistronic iCAR/aCAR construct or monocistronic aCAR and iCAR constructs for co-transduction, the iCAR inhibitory domain component is a TIM3 inhibitory domain (SEQ ID NO:135).

[0128] In some embodiments of the bicistronic iCAR/aCAR construct or monocistronic aCAR and iCAR constructs for co-transduction, the iCAR inhibitory domain component is a VISTA inhibitory domain (SEQ ID NO:136).

[0129] In some embodiments of the bicistronic iCAR/aCAR construct or monocistronic aCAR and iCAR constructs for co-transduction, the iCAR inhibitory domain component is a TIGIT inhibitory domain (SEQ ID NO:137).

[0130] In some embodiments of the bicistronic iCAR/aCAR construct or monocistronic aCAR and iCAR constructs for co-transduction, the iCAR inhibitory domain component is a SIRPalpha inhibitory domain (SEQ ID NO:138).

[0131] In some embodiments of the bicistronic iCAR/aCAR construct or monocistronic aCAR and iCAR constructs for co-transduction, the iCAR inhibitory domain component is a FcγRIIB inhibitory domain (SEQ ID NO:139).

[0132] In some embodiments of the bicistronic iCAR/aCAR construct or monocistronic aCAR and iCAR constructs for co-transduction, the iCAR inhibitory domain component is a CD5 inhibitory domain (SEQ ID NO:140).

[0133] In some embodiments of the bicistronic iCAR/aCAR construct or monocistronic aCAR and iCAR constructs for co-transduction, the iCAR inhibitory domain component is a CD300a inhibitory domain (SEQ ID NO:141).

[0134] In some embodiments of the bicistronic iCAR/aCAR construct or monocistronic aCAR and iCAR constructs for co-transduction, the iCAR inhibitory domain component is a CD300f inhibitory domain (SEQ ID NO:142).

[0135] In some embodiments of the bicistronic iCAR/aCAR construct or monocistronic aCAR and iCAR constructs for co-transduction, the iCAR inhibitory domain component is a LIR1 inhibitory domain (SEQ ID NO:143).

[0136] In some embodiments of the bicistronic iCAR/aCAR construct or monocistronic aCAR and iCAR constructs for co-transduction, the iCAR inhibitory domain component is a LIR2 inhibitory domain (SEQ ID NO:144).

[0137] In some embodiments of the bicistronic iCAR/aCAR construct or monocistronic aCAR and iCAR constructs for co-transduction, the iCAR inhibitory domain component is a LIR3 inhibitory domain (SEQ ID NO:145).

[0138] In some embodiments of the bicistronic iCAR/aCAR construct or monocistronic aCAR and iCAR constructs for co-transduction, the iCAR inhibitory domain component is a LIR5 inhibitory domain (SEQ ID NO:146).

[0139] In some embodiments of the bicistronic iCAR/aCAR construct or monocistronic aCAR and iCAR constructs for co-transduction, the iCAR inhibitory domain component is a LIR8 inhibitory domain (SEQ ID NO:147).

[0140] In some embodiments of the bicistronic iCAR/aCAR construct or monocistronic aCAR and iCAR constructs for co-transduction, the iCAR inhibitory domain component is a Ly9 inhibitory domain (SEQ ID NO:148).

[0141] In some embodiments of the bicistronic iCAR/aCAR construct or monocistronic aCAR and iCAR constructs for co-transduction, the iCAR inhibitory domain component is a 2xPD1(G4S) inhibitory domain (SEQ ID NO:149).

[0142] In some embodiments of the bicistronic iCAR/aCAR construct or monocistronic aCAR and iCAR constructs for co-transduction, the iCAR inhibitory domain component is a 2xPD1(PD1) inhibitory domain (SEQ ID NO:150).

[0143] In some embodiments of the bicistronic iCAR/aCAR construct or monocistronic aCAR and iCAR constructs for co-transduction, the iCAR inhibitory domain component is a PVRIg inhibitory domain (SEQ ID NO:151).

[0144] In some embodiments of the bicistronic iCAR/aCAR construct or monocistronic aCAR and iCAR constructs for co-transduction, the iCAR inhibitory domain component is a AA2AR inhibitory domain (SEQ ID NO:152).

[0145] In some embodiments of the bicistronic iCAR/aCAR construct or monocistronic aCAR and iCAR constructs for co-transduction, the aCAR single chain variable fragment (scFv) component targets Her2.

[0146] In some embodiments of the bicistronic iCAR/aCAR construct or monocistronic aCAR and iCAR constructs for co-transduction, the aCAR scFv comprises the Vh and Vl from trastuzumab (SEQ ID NOs:170 and 171, respectively).

[0147] In some embodiments of the bicistronic iCAR/aCAR construct or monocistronic aCAR and iCAR constructs for co-transduction, the aCAR scFv is SEQ ID NO:172.

[0148] In some embodiments of the bicistronic iCAR/aCAR construct or monocistronic aCAR and iCAR constructs for co-transduction, the aCAR scFv comprises the Vh and Vl from trastuzumab F9G (SEQ ID NOs: 307 and 308).

[0149] In some embodiments of the bicistronic iCAR/aCAR construct or monocistronic aCAR and iCAR constructs for co-transduction, the aCAR scFv comprises the Vh and Vl from pertuzumab (SEQ ID NOs:173 and 174, respectively).

[0150] In some embodiments of the bicistronic iCAR/aCAR construct or monocistronic aCAR and iCAR constructs for co-transduction, the aCAR scFv is SEQ ID NO:175.

[0151] In some embodiments of the bicistronic iCAR/aCAR construct or monocistronic aCAR and iCAR constructs for co-transduction, the aCAR scFv comprises the Vh and Vl from FRP5 (SEQ ID NOs:176 and 177, respectively).

[0152] In some embodiments of the bicistronic iCAR/aCAR construct or monocistronic aCAR and iCAR constructs for co-transduction, the aCAR scFv comprises the Vh and Vl from A21 (SEQ ID NOs:178 and 179, respectively).

[0153] In some embodiments of the bicistronic iCAR/aCAR construct or monocistronic aCAR and iCAR constructs for co-transduction, the aCAR scFv comprises the Vh and Vl from XMT1517 (SEQ ID NOs:180 and 181, respectively).

[0154] In some embodiments of the bicistronic iCAR/aCAR construct or monocistronic aCAR and iCAR constructs for co-transduction, the aCAR scFv comprises the Vh and Vl from XMT1518 (SEQ ID NOs:182 and 183, respectively).

[0155] In some embodiments of the bicistronic iCAR/aCAR construct or monocistronic aCAR and iCAR constructs for co-transduction, the aCAR scFv comprises the Vh and Vl from XMT1519 (SEQ ID NOs:184 and 185, respectively).

[0156] In some embodiments of the bicistronic iCAR/aCAR construct or monocistronic aCAR and iCAR constructs for co-transduction, the aCAR scFv comprises the Vh and Vl from FWP51 (SEQ ID NOs:186 and 187, respectively).

[0157] In some embodiments of the bicistronic iCAR/aCAR construct or monocistronic aCAR and iCAR constructs for co-transduction, the aCAR scFv comprises SEQ ID NOs: 188.

[0158] In some embodiments of the bicistronic iCAR/aCAR construct or monocistronic aCAR and iCAR constructs for co-transduction, the aCAR single chain variable fragment (scFv) component targets EGFR.

[0159] In some embodiments of the bicistronic iCAR/aCAR construct or monocistronic aCAR and iCAR constructs for co-transduction, the aCAR scFv comprises the Vh and Vl from cetuximab (SEQ ID NOs:189 and 190, respectively).

[0160] In some embodiments of the bicistronic iCAR/aCAR construct or monocistronic aCAR and iCAR constructs for co-transduction, the aCAR scFv is SEQ ID NO:191.

[0161] In some embodiments of the bicistronic iCAR/aCAR construct or monocistronic aCAR and iCAR constructs for co-transduction, the aCAR scFv comprises the Vh and Vl from panitumumab (SEQ ID NOs:192 and 193, respectively).

[0162] In some embodiments of the bicistronic iCAR/aCAR construct or monocistronic aCAR and iCAR constructs for co-transduction, the aCAR scFv is SEQ ID NO:194.

[0163] In some embodiments of the bicistronic iCAR/aCAR construct or monocistronic aCAR and iCAR constructs for co-transduction, the aCAR scFv comprises the Vh and Vl from Imgatuzumab (SEQ ID NOs:195 and 196, respectively).

[0164] In some embodiments of the bicistronic iCAR/aCAR construct or monocistronic aCAR and iCAR constructs for co-transduction, the aCAR scFv comprises the Vh and Vl from Nimotuzumab (SEQ ID NOs:197 and 198, respectively).

[0165] In some embodiments of the bicistronic iCAR/aCAR construct or monocistronic aCAR and iCAR constructs for co-transduction, the aCAR scFv comprises the Vh and Vl from Nimotuzumab (K5) (SEQ ID NOs:310 and 311, respectively).

[0166] In some embodiments of the bicistronic iCAR/aCAR construct or monocistronic aCAR and iCAR constructs for co-transduction, the aCAR scFv comprises the Vh and Vl from Necitumumab (SEQ ID NOs:199 and 200, respectively).

[0167] In some embodiments of the bicistronic iCAR/aCAR construct or monocistronic aCAR and iCAR constructs for co-transduction, the aCAR scFv comprises the Vh and Vl from ICR62 (SEQ ID NOs:201 and 202, respectively).

[0168] In some embodiments of the bicistronic iCAR/aCAR construct or monocistronic aCAR and iCAR constructs for co-transduction, the aCAR scFv comprises the Vh and Vl from Matuzumab (SEQ ID NOs:204 and 205, respectively).

[0169] In some embodiments of the bicistronic iCAR/aCAR construct or monocistronic aCAR and iCAR constructs for co-transduction, the aCAR scFv comprises the Vh and Vl from C10 (SEQ ID NOs:206 and 207, respectively).

[0170] In some embodiments of the bicistronic iCAR/aCAR construct or monocistronic aCAR and iCAR constructs for co-transduction, the aCAR scFv comprises the Vh and Vl from Zalutumumab (SEQ ID NOs:208 and 209, respectively).

[0171] In some embodiments of the bicistronic iCAR/aCAR construct or monocistronic aCAR and iCAR constructs for co-transduction, the aCAR scFv comprises the Vh and Vl from P1X (SEQ ID NOs:210 and 211, respectively).

[0172] In some embodiments of the bicistronic iCAR/aCAR construct or monocistronic aCAR and iCAR constructs for co-transduction, the aCAR scFv comprises the Vh and Vl from P2X (SEQ ID NOs:212 and 213, respectively).

[0173] In some embodiments of the bicistronic iCAR/aCAR construct or monocistronic aCAR and iCAR constructs for co-transduction, the aCAR scFv comprises the Vh and Vl from P3X (SEQ ID NOs:214 and 215, respectively).

[0174] In some embodiments of the bicistronic iCAR/aCAR construct or monocistronic aCAR and iCAR constructs for co-transduction, the aCAR scFv comprises the VH from EGFR-1a1-VHH (SEQ ID NO:216).

[0175] In some embodiments of the bicistronic iCAR/aCAR construct or monocistronic aCAR and iCAR constructs for co-transduction, the aCAR scFv comprises the VH from EGFR-VHH (SEQ ID NO:312).

[0176] In some embodiments of the bicistronic iCAR/aCAR construct or monocistronic aCAR and iCAR constructs for co-transduction, the aCAR single chain variable fragment (scFv) component targets Mesothelin.

[0177] In some embodiments of the bicistronic iCAR/aCAR construct or monocistronic aCAR and iCAR constructs for co-transduction, the aCAR scFv comprise the Vh and Vl from Amatuximab (SEQ ID NOs:217 and 218, respectively).

[0178] In some embodiments of the bicistronic iCAR/aCAR construct or monocistronic aCAR and iCAR constructs for co-transduction, the aCAR scFv comprise the Vh and Vl from P4 (SEQ ID NOs:219 and 220, respectively).

[0179] In some embodiments of the bicistronic iCAR/aCAR construct or monocistronic aCAR and iCAR constructs for co-transduction, the aCAR scFv comprise the Vh and Vl from SS1 (SEQ ID NOs:222 and 223, respectively).

[0180] In some embodiments of the bicistronic iCAR/aCAR construct or monocistronic aCAR and iCAR constructs for co-transduction, the aCAR scFv comprise the VHH from SD1 (SEQ ID NO:225).

[0181] In some embodiments of the bicistronic iCAR/aCAR construct or monocistronic aCAR and iCAR constructs for co-transduction, the aCAR scFv comprise the VHH from SD2 (SEQ ID NO:226).

[0182] In some embodiments of the bicistronic iCAR/aCAR construct or monocistronic aCAR and iCAR constructs for co-transduction, the aCAR scFv comprise the Vh and Vl from 1H7 (SEQ ID NOs:227 and 228, respectively).

[0183] In some embodiments of the bicistronic iCAR/aCAR construct or monocistronic aCAR and iCAR constructs for co-transduction, the aCAR scFv comprise the Vh and Vl from 3C02 (SEQ ID NOs:230 and 231, respectively).

[0184] In some embodiments of the bicistronic iCAR/aCAR construct or monocistronic aCAR and iCAR constructs for co-transduction, the hinge TM domain component is selected from the group consisting of a CD28 hinge and a CD8 hinge (including a CD8a hinge domain).

[0185] In some embodiments of the bicistronic iCAR/aCAR construct or monocistronic aCAR and iCAR constructs for co-transduction, the hinge TM domain component is a CD28 hinge domain (SEQ ID NO: 85).

[0186] In some embodiments of the bicistronic iCAR/aCAR construct or monocistronic aCAR and iCAR constructs for co-transduction, the hinge TM domain component is a CD8 alpha hinge domain (SEQ ID NO: 84).

[0187] In some embodiments of the bicistronic iCAR/aCAR construct or monocistronic aCAR and iCAR constructs for co-transduction, the co-stimulatory domain component is selected from the group consisting of a CD137 (4-1BB) co-stimulatory domain, a CD28 co-stimulatory domain, a 28BB co-stimulatory domain, and a CD3z co-stimulatory domain.

[0188] In some embodiments of the bicistronic iCAR/aCAR construct or monocistronic aCAR and iCAR constructs for co-transduction, the co-stimulatory domain component is a CD137 (4-1BB) co-stimulatory domain (SEQ ID NO:233).

[0189] In some embodiments of the bicistronic iCAR/aCAR construct or monocistronic aCAR and iCAR constructs for co-transduction, the co-stimulatory domain component is a CD28 co-stimulatory domain (SEQ ID NO:234).

[0190] In some embodiments of the bicistronic iCAR/aCAR construct or monocistronic aCAR and iCAR constructs for co-transduction, the co-stimulatory domain component a CD3z activation signaling domain (SEQ ID NO:235).

[0191] In some embodiments of the bicistronic iCAR/aCAR construct or monocistronic aCAR and iCAR constructs for co-transduction, the ITAM is a CD3 zeta domain.

[0192] In some embodiments of the bicistronic iCAR/aCAR construct or monocistronic aCAR and iCAR constructs for co-transduction, the ITAM is a CD3 zeta domain (SEQ ID NO:236).

[0193] In some embodiments of the bicistronic iCAR/aCAR construct or monocistronic aCAR and iCAR constructs for co-transduction, the ITAM is a CD3 zeta 3F domain (SEQ ID NO:237).

[0194] In some embodiments of the bicistronic iCAR/aCAR construct or monocistronic aCAR and iCAR constructs for co-transduction, the ITAM is a CD3 zeta 4F domain (SEQ ID NO:238).

[0195] In some embodiments of the bicistronic iCAR/aCAR construct or monocistronic aCAR and iCAR constructs for co-transduction, the ITAM is a CD3 zeta 4OF domain (SEQ ID NO:239).

[0196] In some embodiments of the bicistronic iCAR/aCAR construct or monocistronic aCAR and iCAR constructs for co-transduction, the linker connecting the iCAR portion and the aCAR portion comprises one or more linker selected from the group consisting of T2A (SEQ ID NO:155), F2A (SEQ ID NO:156), P2A (SEQ ID NO:157), E2A (SEQ ID NO:158), and an IRES sequence (SEQ ID NO:159 or 160).

[0197] In some embodiments of the bicistronic iCAR/aCAR construct or monocistronic aCAR and iCAR constructs for co-transduction, the linker connecting the iCAR portion and the aCAR portion is GSG T2A (SEQ ID NO:155).

[0198] In some embodiments of the bicistronic iCAR/aCAR construct or monocistronic aCAR and iCAR constructs for co-transduction, the bicistronic iCAR/aCAR construct comprises an amino acid sequence encoded by a nucleic acid sequence selected from the group consisting of SEQ ID NO:1, SEQ ID NO:3, SEQ ID NO:5, SEQ ID NO:7, SEQ ID NO:9, SEQ ID NO:11, SEQ ID NO:13, SEQ ID NO:15, SEQ ID NO:17, SEQ ID NO:19, SEQ ID NO:21, SEQ ID NO:23, SEQ ID NO:25, SEQ ID NO:27, SEQ ID NO:29, SEQ ID NO:31, SEQ ID NO:33, SEQ ID NO:35, SEQ ID NO:275, SEQ ID NO:277, SEQ ID NO:279, SEQ ID NO:281, SEQ ID NO:321, SEQ ID NO:323, and SEQ ID NO:325.

[0199] In some embodiments of the bicistronic iCAR/aCAR construct or monocistronic aCAR and iCAR constructs for co-transduction, the bicistronic iCAR/aCAR construct comprises an amino acid sequence encoded by a nucleic acid sequence selected from the group consisting of SEQ ID NO:275, SEQ ID NO:277, SEQ ID NO:279, SEQ ID NO:281, SEQ ID NO:321, SEQ ID NO:323, and SEQ ID NO:325.

[0200] In some embodiments of the bicistronic iCAR/aCAR construct or monocistronic aCAR and iCAR constructs for co-transduction, the bicistronic iCAR/aCAR construct comprises an amino acid sequence selected from the group consisting of SEQ ID NO:2, SEQ ID NO:4, SEQ ID NO:6, SEQ ID NO:8, SEQ ID NO:10, SEQ ID NO:12, SEQ ID NO:14, SEQ ID NO:16, SEQ ID NO:18, SEQ ID NO:20, SEQ ID NO:22, SEQ ID NO:24, SEQ ID NO:26, SEQ ID NO:28, SEQ ID NO:30, SEQ ID NO:32, SEQ ID NO:34, SEQ ID NO:36, SEQ ID NO:276, SEQ ID NO:278, SEQ ID NO:280, SEQ ID NO:282, SEQ ID NO:322, SEQ ID NO:324, and SEQ ID NO:326.

[0201] In some embodiments of the bicistronic iCAR/aCAR construct or monocistronic aCAR and iCAR constructs for co-transduction, the bicistronic iCAR/aCAR construct comprises an amino acid sequence selected from the group consisting of SEQ ID NO:276, SEQ ID NO:278, SEQ ID NO:280, SEQ ID NO:282, SEQ ID NO:322, SEQ ID NO:324, and SEQ ID NO:326.

[0202] In some embodiments of the bicistronic iCAR/aCAR construct or monocistronic aCAR and iCAR constructs for co-transduction, the bicistronic iCAR/aCAR construct further comprises a short hairpin RNA (shRNA).

[0203] In some embodiments of the bicistronic iCAR/aCAR construct or monocistronic aCAR and iCAR constructs for co-transduction as described herein comprise an iCAR that comprises a synthetic PD-1 or LIR1 sequence as shown in Table 8, including one selected from the group consisting of SEQ ID NO:243, SEQ ID NO:244, SEQ ID NO:245, SEQ ID NO:246, SEQ ID NO:247, SEQ ID NO:248, SEQ ID NO:249, SEQ ID NO:250, SEQ ID NO:251, SEQ ID NO:252, SEQ ID NO:253, SEQ ID NO:254, SEQ ID NO:296, SEQ ID NO:297, SEQ ID NO:298, SEQ ID NO:299, SEQ ID NO:300, SEQ ID NO:301, SEQ ID NO:302, and SEQ ID NO:304.

[0204] In some embodiments of the bicistronic iCAR/aCAR construct or monocistronic aCAR and iCAR constructs for co-transduction as described herein comprise an iCAR comprising an amino acid sequence selected from the group consisting of SEQ ID NO: 255, SEQ ID NO:256, SEQ ID NO:257, SEQ ID NO:258, SEQ ID NO:305, SEQ ID NO:259, SEQ ID NO:260, SEQ ID NO:261, SEQ ID NO:262, SEQ ID NO:263, SEQ ID NO:264, SEQ ID NO:265, SEQ ID NO:266, SEQ ID NO:267, SEQ ID NO:268, SEQ ID NO:269, SEQ ID NO:270, SEQ ID NO:271, SEQ ID NO:272, SEQ ID NO:327, SEQ ID NO:328, SEQ ID NO:329, SEQ ID NO:330, SEQ ID NO:331, SEQ ID NO:332, SEQ ID NO:333, and SEQ ID NO:334.

[0205] In some embodiments of the bicistronic iCAR/aCAR construct or monocistronic aCAR and iCAR constructs for co-transduction as described herein comprise a construct as described in Table 1, Table 11 and/or Table 12.

[0206] In some embodiments of the bicistronic iCAR/aCAR construct or monocistronic aCAR and iCAR constructs for co-transduction as described herein comprise a construct or portion thereof as described in any one of Tables 1 to 22.

[0207] In some embodiments of the bicistronic iCAR/aCAR construct or monocistronic aCAR and iCAR constructs for co-transduction as described herein comprise a construct as described in any one of Tables 15, 16, 17, and/or 21.

[0208] In some embodiments of the bicistronic iCAR/aCAR construct or monocistronic aCAR and iCAR constructs for co-transduction as described herein comprise a construct as described in any one of Tables 1, 2, 4, 9, 10, 11 and/or 12.

[0209] The present invention also provides for a nucleic acid composition comprising a nucleic acid that encodes a bicistronic iCAR/aCAR construct or monocistronic aCAR and iCAR constructs for co-transduction according to any one of the preceding claims.

[0210] The present invention also provides for a vector comprising a nucleic acid sequence encoding for a bicistronic iCAR/aCAR construct or monocistronic aCAR and iCAR constructs for co-transduction according to any one of the preceding claims.

[0211] The present invention also provides for a vector composition comprising the vector according to paragraphs [00192].

[0212] In some embodiments, the iCAR/aCAR construct or monocistronic aCAR and iCAR constructs for co-transduction comprises a signal peptide upstream of the iCAR and/or aCAR portions. In some embodiments, the signal peptide is a CD8 alpha signal peptide (SEQ ID NO: 161), a GM-CSF signal peptide (SEQ ID NO: 162), or a mIgK signal peptide (SEQ ID NO: 306).

[0213] The present invention also provides for a safe effector cell comprising a nucleic acid or nucleic acid sequence composition as described herein.

[0214] The present invention also provides for a safe effector cell comprising a vector or vector composition o as described herein.

[0215] A safe effector immune cell expressing a bicistronic iCAR/aCAR construct or monocistronic aCAR and iCAR constructs for co-transduction as described herein.

[0216] A method for treating cancer in a patient having a tumor characterized by LOH, comprising administering to the patient a safe effector immune cell as described herein.

[0217] A method for treating cancer in a patient having a tumor characterized by a genetic mutation resulting in a complete loss of expression of a target gene or target extracellular polymorphic epitope gene, comprising administering to the patient a safe effector immune cell as described herein.

[0218] A method for treating cancer in a patient having a tumor characterized by loss of heterozygosity (LOH), or other genetic loss or allelic imbalance phenotypes including, without limitation, loss of function or expression, resulting from mutations affecting one or more nucleotides, comprising administering to the patient a safe effector immune cell as described herein.

[0219] In some embodiments, the cancer is selected from the group consisting of Acute Myeloid Leukemia [LAML], Adrenocortical carcinoma [ACC], Bladder Urothelial Carcinoma [BLCA], Brain Lower Grade Glioma [LGG], Breast invasive carcinoma [BRCA], Cervical squamous cell carcinoma and endocervical adenocarcinoma [CESC], Cholangiocarcinoma [CHOL], Colon adenocarcinoma [COAD], Esophageal carcinoma [ESCA], Glioblastoma multiforme [GBM], Head and Neck squamous cell carcinoma [HNSC], Kidney Chromophobe [KICH], Kidney renal clear cell carcinoma [KIRC], Kidney renal papillary cell carcinoma [KIRP], Liver hepatocellular carcinoma [LIHC], Lung adenocarcinoma [LUAD], Lung squamous cell carcinoma [LUSC], Lymphoid Neoplasm Diffuse Large B-cell Lymphoma [DLBC], Mesothelioma [MESO], Ovarian serous cystadenocarcinoma [OV], Pancreatic adenocarcinoma [PAAD], Pheochromocytoma and Paraganglioma [PCPG], Prostate adenocarcinoma [PRAD], Rectum adenocarcinoma [READ], Sarcoma [SARC], Skin Cutaneous Melanoma [SKCM], Stomach adenocarcinoma [STAD], Testicular Germ Cell Tumors [TGCT], Thymoma [THYM], Thyroid carcinoma [THCA], Uterine Carcinosarcoma [UCS], Uterine Corpus Endometrial Carcinoma [UCEC], Uveal Melanoma [UVM], Non-small cell lung carcinoma [NSCLC], and Small cell lung cancer [SCLC].

### BRIEF DESCRIPTION OF THE DRAWINGS

[0220] FIG. 1 shows bicistronic construct design overview and component table.

[0221] FIGS. 2A-2H show bicistronic survey—constructs MC0280-MC0300, MC0428, MC0447, MC0449, HLA-A2 shRNA.

[0222] FIG. 3 shows BTLA & KIR2DL2 as new iCAR leads.

[0223] FIG. 4 shows identification of fully human scFv constructs with higher HLA-A binding avidity.

[0224] FIG. 5 shows 3PF12 & SN66E3 PD-1 iCAR exhibit are more stably expressed.

[0225] FIG. 6 shows a schematic for luciferase-based cytotoxicity assays.

[0226] FIGS. 7A-7B. A) Expression of HER2 Bicistronics Day 9—Donor 466. B) Expression of HER2 Bicistronics Day 9-Donor 149.

[0227] FIG. 8 shows luciferase killing results for LIR1 & KIR2DL1 dual CAR. LIR1 inhibits efficiently the aCAR, enabling high protection for MCF7. KIR2DL1 inhibits the aCAR, enabling moderate protection for MCF7.

[0228] FIG. 9 shows IFNg ELISA assays showing LIR1 and KIR2DL1 inhibition. LIR1 and KIR2DL1 very efficiently inhibit IFNg secretion against MCF7.

[0229] FIG. 10 shows KIR2DL1/2 and LIR1 confirmed as hits in Jurkat assay.

[0230] FIGS. 11A-11B shows low dual CAR lentiviral transduction efficiency and variable expression.

[0231] FIGS. 12A-12B shows experimental set-up and data regarding target cell killing and CAR-T activation correlate with E/T ratio.

[0232] FIG. 13 shows target cell killing and CAR-T activation correlate with E/T ratio.

[0233] FIG. 14 shows a quantum bead assay to determine CAR cell surface level.

[0234] FIG. 15 shows exceptional differential PD-1 iCAR expression relative to HER2 aCAR.

[0235] FIG. 16 shows target antigen quantifications in screen cell-line panel.

[0236] FIG. 17 shows PD-1 iCAR directs HLA-A2 specific EGFR a CAR killing (E/T=2).

[0237] FIG. 18 shows HLA-A2 POS cancer cells specifically inhibit dual CAR T-cells

[0238] FIG. 19 shows iCAR inhibits T-cell degranulation across a wide range of HLA-A2 level.

[0239] FIG. 20 shows a PD-1 iCAR directs HLA-A2 specific HER2 aCAR killing.

[0240] FIG. 21 shows dual CAR lentiviral expression is highly variable (HER2 aCAR).

[0241] FIG. 22 shows cetuximab scFv lentiviral expression is relatively low.

[0242] FIG. 23 shows bicistronic constructs express well on Day 8.

[0243] FIG. 24 shows bicistronic expression is lower on Day 12

[0244] FIG. 25 shows anti-HLA-A2 iCAR screen—construct design

[0245] FIGS. 26A-26B shows alternative scFvs with higher HLA binding than BB7.2 identified.

[0246] FIG. 27 shows iCAR single chain options.

[0247] FIG. 28 shows BB7.2 (two versions), 3PF12, and SN66E3 PD-1 iCAR exhibit are more stably expressed.

[0248] FIG. 29 shows KIR2DL1 iCAR identified as hit in FaDu/U87-LUC immune cell killing assay.

[0249] FIGS. 30A-30B shows a schematic for IMPT001: A dual CART system designed to kill based on tumor specific loss-of-HLA-A2 gene expression.

[0250] FIGS. 31A-31G. shows donor 149 Expression: HER2 Bicistronics Day 12.

[0251] FIGS. 32A-32G shows donor 466 Expression: HER2 Bicistronics Day 12.

[0252] FIG. 33 shows D149 Luciferase Kill Assay Results Day 12. LIR1 inhibits efficiently the aCAR, enabling high protection for H1703, H1650 and MDA-MB231. KIR2DL1 and CD33 inhibit the aCAR, enabling moderate protection for H1703, H1650 and MDA-MB231.

[0253] FIG. 34 shows D466 Luciferase Kill Assay Results Day 12. LIR1 and CD33 inhibits efficiently the aCAR, enabling protection for H1703, H1650. LIR1 and CD33 inhibit very efficiently IFNγ secretion against H1703, H1650 and MCF7.

[0254] FIG. 35 shows HER2 Bicistronic Expression Day 8 from an exemplary experiment.

[0255] FIG. 36 shows VR51 (LIR1 iDomain) protect HLA-A2POS targets. LIR1 inhibits efficiently the aCAR, allowing high protection for H1650 and moderate protection for MDA-MB-231 cells from an exemplary experiment.

[0256] FIG. 37 provides CAR expression on the cell surface. Note: VR52 had very low aCAR expression (excluded from analysis). VR55,56 had no iCAR expression (data not shown) (excluded from analysis). The MFI is of the positive CAR fraction only. To clarify, the aCAR+ fraction of the untransduced cells (3%) has an MFI of 766.

[0257] FIGS. 38A-38C showcell staining of transduced PBMCs (raw data).

[0258] FIG. 39 show bicistronic iCAR/aCAR constructs show efficacy against A2NEG cell lines.

[0259] FIG. 40 show iCAR RNA expression is transient.

[0260] FIGS. 41A-41F show in vitro analysis of bicistronic iCAR-aCAR constructs described herein. VR354 was identified as a superior LIR bicistronic construct for protection against HER2 aCAR killing.

[0261] FIG. 42 show screen of HLA-A2 scFv as aCAR. All humanized BB7.2 versions expressed well and showed both binding and efficacy against an A2 POS target. The top hit seemed to be VR375 due to even lower EC50 compared to VR370.

[0262] FIG. 43 show HLA-A2 enrichment. Anti-PE beads and Miltenyi LS columns were used to achieve successful enrichment of VR51 bicistronic construct in the bound fraction.

[0263] FIGS. 44A-44K show screen of synthetic PD1 constructs. Enriched synthetic PD1 constructs screened using the luciferase assay on H1703 isogenic cell lines showed that synthetic constructs containing 1-5 PD1 ITSM repeats showed superior protection compared to 1-5 PD1 ITIM repeats.

[0264] FIG. 45 showscreen of 1×vs 2×PD1 constructs. Enriched PD1 constructs screened using luciferase assay and isogenic H1703 cell lines showed that 2×PD1 construct showed better protection than the naturally occurring 1×PD1 construct, with the G4S linker (VR68) providing superior protection over the PD1 linker (VR69).

[0265] FIG. 46 show iCAR Engagement Regulates CAR-T Activation. Singular aCAR engagement by iTarget NEG cells induces T-cell activation. Dual aCAR+iCAR engagement inhibits CAR-T activation with iTarget POS cells.

[0266] FIG. 47 show iCAR target POS cancer cells inhibit dual CAR T cells.

[0267] FIG. 48 show iCAR targeted killing of cancer cell lines.

[0268] FIGS. 49A-49B show screen of SN66E3 iCAR scFv constructs. Enriched bicistronic constructs screened using the luciferase assay on H1703 isogenic cell lines showed that constructs containing SN66E3 iCAR scFv showed superior protection.

[0269] FIG. 50 show functional Luc results-Screen of Camel VHH EGFR scFv cotransduced with mBB7.2 scFv with LIR1 or PD1x2 iDomains.

[0270] FIG. 51 show scheme of the in-vivo study design.

[0271] FIG. 52 show scheme of the in-vivo process.

[0272] FIGS. 53A-53D show tumor growth kinetics of a representative in-vivo study with main constructs. Both protection and efficacy are observed for the VR354 and VR51.

[0273] constructs.

[0274] FIGS. 54A-54F show series F in-vivo screen Tumor growth kinetics. The model is the H1703 WT where protection are observed. Top hit for both CAR-T doses is VR428.

[0275] FIGS. 55A-55F show series F in-vivo screen Tumor growth kinetics. The model is the H1703 KO where efficacy are observed. Top hit for both CAR-T doses is VR428.

[0276] FIG. 56 show in vitro screen for synthetic iDomains comprising variations in the LIR1 ITIM and PD-1 ITSM motifs of the iCAR.

[0277] FIG. 57 show series G in vitro screen for humanized and fully human iCAR scFv specific against the HLA-A2 target.

[0278] FIG. 58 show in vitro screen for synthetic LIR1 iDomain comprising variations in the ITIM and ITSM motifs of the iCAR.

[0279] FIG. 59 show series F in vitro screen for humanized iCAR scFv specific against the HLA-A2 target. Validation of HzBB7.2 iCAR scFv in-vitro.

### DETAILED DESCRIPTION OF THE INVENTION

### I. Introduction

[0280] The present invention provides bicistronic and co-administered monocistronic constructs specifically targeting tumor cells while keeping the normal cells protected. The constructs provided herein provide iCAR/aCAR constructs that target single allelic variants of polymorphic cell surface epitopes, which are lost from tumor cells due to loss of heterozygosity (LOH) of the chromosomal region they reside in, while remaining expressed on normal tissue. Because of the polymorphic variation, the iCAR/aCAR pair is able to distinguish the two alleles and target only the tumor cells missing the target allele due to LOH.

### II. Select Definitions

[0281] The term “nucleic acid molecule” as used herein refers to a DNA or RNA molecule.

[0282] The term “encoding” refers to the inherent property of specific sequences of nucleotides in a polynucleotide, such as a gene, a cDNA, or an mRNA, to serve as templates for synthesis of other polymers and macromolecules in biological processes having either a defined sequence of nucleotides (e.g., rRNA, tRNA and mRNA) or a defined sequence of amino acids and the biological properties resulting therefrom. Thus, a gene encodes a protein if transcription and translation of mRNA corresponding to that gene produces the protein in a cell or other biological system. Both the coding strand, the nucleotide sequence of which is identical to the mRNA sequence and is usually provided in sequence listings, and the non-coding strand, used as the template for transcription of a gene or cDNA, can be referred to as encoding the protein or other product of that gene or cDNA.

[0283] Unless otherwise specified, a “nucleotide sequence encoding an amino acid sequence” includes all nucleotide sequences that are degenerate versions of each other and that encode the same amino acid sequence. Nucleotide sequences that encode proteins and RNA may include introns.

[0284] The term “endogenous” refers to any material from or produced inside an organism, cell, tissue or system.

[0285] The term “exogenous” refers to any material introduced from or produced outside an organism, cell, tissue or system.

[0286] The term “expression” as used herein is defined as the transcription and/or translation of a particular nucleotide sequence driven by its promoter.

[0287] “Expression vector” refers to a vector comprising a recombinant polynucleotide comprising expression control sequences operatively linked to a nucleotide sequence to be expressed. An expression vector comprises sufficient cis-acting elements for expression; other elements for expression can be supplied by the host cell or in an in vitro expression system. Expression vectors include all those known in the art, such as cosmids, plasmids (e.g., naked or contained in liposomes) and viruses (e.g., lentiviruses, retroviruses, adenoviruses, and adeno-associated viruses) that incorporate the recombinant polynucleotide.

[0288] The term “genomic variant” as used herein refers to a change of at least one nucleotide at the genomic level in a sequenced sample compared to the reference or consensus sequence at the same genomic position.

[0289] The term “corresponding reference allele” as used herein with reference to a variant means the reference or consensus sequence or nucleotide at the same genomic position as the variant.

[0290] The term “extracellular domain” as used herein with reference to a protein means a region of the protein which is outside of the cell membrane.

[0291] The term “loss of heterozygosity” or “LOH” as used herein means the loss of chromosomal materials such as a complete chromosome or a part thereof, in one copy of the two chromosomes in a somatic cell.

[0292] The term “sequence region” as used herein with reference to a variant or a reference allele means a sequence starting upstream and ending downstream from the position of the variant, which can be translated into an “epitope peptide” that can be recognized by an antibody.

[0293] The term “CAR”, as that term is used herein, refers to a chimeric polypeptide that shares structural and functional properties with a cell immune-function receptor or adaptor molecule, from e.g., a T cell or a NK cell. CARs include TCARs and NKR-CARs. Upon binding to cognate antigen, a CAR can activate or inactivate the cytotoxic cell in which it is disposed, or modulate the cell's antitumor activity or otherwise modulate the cells immune response.

[0294] The term “specific binding” as used herein in the context of an extracellular domain, such as an scFv, that specifically binds to a single allelic variant of a polymorphic cell surface epitope, refers to the relative binding of the scFv to one allelic variant and its failure to bind to the corresponding different allelic variant of the same polymorphic cell surface epitope. Since this depends on the avidity (number of CAR copies on the T cell, number of antigen molecules on the surface of target cells (or cells to be protected) and the affinity of the specific CARs used, a functional definition would be that the specific scFv would provide a significant signal in an ELISA against the single allelic variant of a polymorphic cell surface epitope to which it is specific or cells transfected with a CAR displaying the scFv would be clearly labeled with the single allelic variant of a polymorphic cell surface epitope in a FACS assay, while the same assays using the corresponding different allelic variant of the same polymorphic cell surface epitope would not give any detectable signal.

[0295] The term “treating” as used herein refers to means of obtaining a desired physiological effect. The effect may be therapeutic in terms of partially or completely curing a disease and/or symptoms attributed to the disease. The term refers to inhibiting the disease, e.g., arresting its development; or ameliorating the disease, e.g., causing regression of the disease.

[0296] As used herein, the terms “subject” or “individual” or “animal” or “patient” or “mammal,” refers to any subject, particularly a mammalian subject, for whom diagnosis, prognosis, or therapy is desired, for example, a human.

[0297] The phrase “safe effector immune cell” or “safe effector cell” includes those cells described by the invention that express at least one bicistronic iCAR/aCAR construct, or portion thereof, as described herein, or exhibit co-expression of monocistronic aCAR and iCAR constructs. In some embodiments, the “safe effector immune cell” or “safe effector cell” is capable of administration to a subject. In some embodiments, the “safe effector immune cell” or “safe effector cell” further expresses at least one bicistronic iCAR/aCAR construct, or portion thereof, or exhibit co-expression of monocistronic aCAR and iCAR constructs, as described herein.

[0298] Pharmaceutical compositions for use in accordance with the present invention may be formulated in conventional manner using one or more physiologically acceptable carriers or excipients. The carrier(s) must be “acceptable” in the sense of being compatible with the other ingredients of the composition and not deleterious to the recipient thereof.

[0299] The phrase “effective amount” or “therapeutically effective amount” are used interchangeably herein, and refer to an amount of a compound, formulation, material, or composition, as described herein effective to achieve a particular biological result.

[0300] The term “peripheral blood mononuclear cell (PBMC)” as used herein refers to any blood cell having a round nucleus, such as a lymphocyte, or a monocyte. Methods for isolating PBMCs from blood are readily apparent to those skilled in the art. A non-limiting example is the extraction of these cells from whole blood using ficoll, a hydrophilic polysaccharide that separates layers of blood, with monocytes and lymphocytes forming a buffy coat under a layer of plasma or by leukapheresis, the preparation of leukocyte concentrates with the return of red cells and leukocyte-poor plasma to the donor.

[0301] The term “cancer” as used herein is defined as disease characterized by the rapid and uncontrolled growth of aberrant cells. Cancer cells can spread locally or through the bloodstream and lymphatic system to other parts of the body. Examples of various cancers include but are not limited to, breast cancer, prostate cancer, ovarian cancer, cervical cancer, skin cancer, pancreatic cancer, colorectal cancer, renal cancer, liver cancer, brain cancer, lymphoma, leukemia, lung cancer, glioma, and the like.

### III. CAR-T SYSTEM: iCARs and aCARs

[0302] LOH, being a genomic event, results in a total loss of a specific variant from the tumor with a very rare probability of gaining back the lost allele. If the LOH event occurs very early in the development of tumors, it ensures a uniform target signature in all tumor cells derived from the initial pre-malignant tissue including metastatic tumors. Additionally, LOH occurs in almost all types of cancer and this concept can therefore be relied upon as a universal tool for developing markers relevant to all these cancer types. Since the LOH events are to some extent random, the present invention further provides for selection of personalized tumor markers for each individual cancer patient, based on the specific LOH events which took place in that patient. The tools relied upon to execute this concept, the aCARs and the iCARs, are well-known and can be easily prepared using methods well-known in the art as taught for example, in WO 2015/142314 and in U.S. Pat. No. 9,745,368, both incorporated by reference as if fully disclosed herein.

[0303] According to one strategy, the two CARs in every given pair specifically recognize the product of a different allelic variant of the same target gene for which the patient is heterozygous. The basic principle is as follows: the aCAR targets an allelic variant of a selected cell surface protein that is expressed by the given tumor cells and is not affected by LOH while the iCAR targets the product encoded by the allelic variant of the same gene that has been lost from these tumor cells due to LOH. In other normal tissues of that individual patient that express the said gene, both alleles are present and are known to be equally functional, that is, expression is biallelic in all tissues (in contrast to other genes which may exhibit random monoallelic expression (Chess, 2012; Savova et al., 2016). In one scenario, the two CARs target two related epitopes residing at the same location on the protein product, which differ by one, or only few amino acids. In another scenario, the aCAR targets a non-polymorphic epitope on the same protein while the iCAR is allele-specific. In these embodiments, the density of the aCAR epitope on normal cells would generally be two-fold higher than that of the iCAR one. In some embodiments, a single nucleic acid vector encodes both the aCAR and iCAR, as exemplified with the bicistronic constructs described herein. In some embodiments, the aCAR and iCAR are encoded by separate nucleic acid vectors and co-expressed.

[0304] Care must be taken to ensure that the inhibitory signal transmitted by the iCAR is dominant over the aCAR signal and that cross-recognition between the iCAR and the aCAR is limited and/or negligible. Dominance of the iCAR guarantees that activation of the killer cell upon encounter with normal cells expressing both alleles would be prevented. This default brake would not operate upon engagement with tumor cells: in the absence of its target antigen the iCAR would not deliver inhibitory signals, thus unleashing the anticipated aCAR-mediated cellular activation and subsequent tumor cell lysis. Dominance of the iCARs over their aCARs counterparts is a significant portion of how the system functions. The present invention provides novel bicistronic iCAR/aCAR constructs that function in this manner, as well as methods for co-transduction of monocistronic aCAR and iCAR constructs.

[0305] The bicistronic constructs of the present invention comprise the following components: an iCAR and aCAR connected via a linker domain. In some embodiments, the iCAR (protective) portion comprises an iCAR scFv, a hinge transmembrane (TM) domain, and inhibitory domain. In some embodiments, the aCAR (efficacy) portion comprises an aCAR scFv, a hinge transmembrane (TM) domain, a co-stimulatory domain, and a CD3 zeta domain.

[0306] I. Bicistronic Sequences

[0307] In some embodiments, the bicistronic iCAR/aCAR comprises an amino acid sequence encoded by a nucleic acid sequence selected from the group consisting of SEQ ID NO:1, SEQ ID NO:3, SEQ ID NO:5, SEQ ID NO:7, SEQ ID NO:9, SEQ ID NO:11, SEQ ID NO:13, SEQ ID NO:15, SEQ ID NO:17, SEQ ID NO:19, SEQ ID NO:21, SEQ ID NO:23, SEQ ID NO:25, SEQ ID NO:27, SEQ ID NO:29, SEQ ID NO:31, SEQ ID NO:33, SEQ ID NO:35, SEQ ID NO:275, SEQ ID NO:277, SEQ ID NO:279, SEQ ID NO:281, SEQ ID NO:321, SEQ ID NO:323, and SEQ ID NO:325, as provided in Table 1 below. In some embodiments, the bicistronic iCAR/aCAR comprise an amino acid sequence encoded by a nucleic acid sequence comprising SEQ ID NO:1. In some embodiments, the bicistronic iCAR/aCAR comprise an amino acid sequence encoded by a nucleic acid sequence comprising SEQ ID NO:3. In some embodiments, the bicistronic iCAR/aCAR comprise an amino acid sequence encoded by a nucleic acid sequence comprising SEQ ID NO:5. In some embodiments, the bicistronic iCAR/aCAR comprise an amino acid sequence encoded by a nucleic acid sequence comprising SEQ ID NO:7. In some embodiments, the bicistronic iCAR/aCAR comprise an amino acid sequence encoded by a nucleic acid sequence comprising SEQ ID NO:9. In some embodiments, the bicistronic iCAR/aCAR comprise an amino acid sequence encoded by a nucleic acid sequence comprising SEQ ID NO:11. In some embodiments, the bicistronic iCAR/aCAR comprise an amino acid sequence encoded by a nucleic acid sequence comprising SEQ ID NO:13. In some embodiments, the bicistronic iCAR/aCAR comprise an amino acid sequence encoded by a nucleic acid sequence comprising SEQ ID NO:15. In some embodiments, the bicistronic iCAR/aCAR comprise an amino acid sequence encoded by a nucleic acid sequence comprising SEQ ID NO:17. In some embodiments, the bicistronic iCAR/aCAR comprise an amino acid sequence encoded by a nucleic acid sequence comprising SEQ ID NO:19. In some embodiments, the bicistronic iCAR/aCAR comprise an amino acid sequence encoded by a nucleic acid sequence comprising SEQ ID NO:21. In some embodiments, the bicistronic iCAR/aCAR comprise an amino acid sequence encoded by a nucleic acid sequence comprising SEQ ID NO:23. In some embodiments, the bicistronic iCAR/aCAR comprise an amino acid sequence encoded by a nucleic acid sequence comprising SEQ ID NO:25. In some embodiments, the bicistronic iCAR/aCAR comprise an amino acid sequence encoded by a nucleic acid sequence comprising SEQ ID NO:27. In some embodiments, the bicistronic iCAR/aCAR comprise an amino acid sequence encoded by a nucleic acid sequence comprising SEQ ID NO:29. In some embodiments, the bicistronic iCAR/aCAR comprise an amino acid sequence encoded by a nucleic acid sequence comprising SEQ ID NO:31. In some embodiments, the bicistronic iCAR/aCAR comprise an amino acid sequence encoded by a nucleic acid sequence comprising SEQ ID NO:33. In some embodiments, the bicistronic iCAR/aCAR comprise an amino acid sequence encoded by a nucleic acid sequence comprising SEQ ID NO:35. In some embodiments, the bicistronic iCAR/aCAR comprise an amino acid sequence encoded by a nucleic acid sequence comprising SEQ ID NO:275. In some embodiments, the bicistronic iCAR/aCAR comprise an amino acid sequence encoded by a nucleic acid sequence comprising SEQ ID NO:277. In some embodiments, the bicistronic iCAR/aCAR comprise an amino acid sequence encoded by a nucleic acid sequence comprising SEQ ID NO:279. In some embodiments, the bicistronic iCAR/aCAR comprise an amino acid sequence encoded by a nucleic acid sequence comprising SEQ ID NO:281. In some embodiments, the bicistronic iCAR/aCAR comprise an amino acid sequence encoded by a nucleic acid sequence comprising SEQ ID NO:321. In some embodiments, the bicistronic iCAR/aCAR comprise an amino acid sequence encoded by a nucleic acid sequence comprising SEQ ID NO:323. In some embodiments, the bicistronic iCAR/aCAR comprise an amino acid sequence encoded by a nucleic acid sequence comprising SEQ ID NO:325.

[0308] In some embodiments, the bicistronic iCAR/aCAR comprises an amino acid sequence selected from the group consisting of SEQ ID NO:2, SEQ ID NO:4, SEQ ID NO:6, SEQ ID NO:8, SEQ ID NO:10, SEQ ID NO:12, SEQ ID NO:14, SEQ ID NO:16, SEQ ID NO:18, SEQ ID NO:20, SEQ ID NO:22, SEQ ID NO:24, SEQ ID NO:26, SEQ ID NO:28, SEQ ID NO:30, SEQ ID NO:32, SEQ ID NO:34, SEQ ID NO:36, SEQ ID NO:276, SEQ ID NO:278, SEQ ID NO:280, SEQ ID NO:282, SEQ ID NO:322, SEQ ID NO:324, and SEQ ID NO:326 as provided in Table 1.

[0309] below. In some embodiments, the bicistronic iCAR/aCAR comprises SEQ ID NO:2. In some embodiments, the bicistronic iCAR/aCAR comprises SEQ ID NO:4. In some embodiments, the bicistronic iCAR/aCAR comprises SEQ ID NO:6. In some embodiments, the bicistronic iCAR/aCAR comprises SEQ ID NO:8. In some embodiments, the bicistronic iCAR/aCAR comprises SEQ ID NO:10. In some embodiments, the bicistronic iCAR/aCAR comprises SEQ ID NO:12. In some embodiments, the bicistronic iCAR/aCAR comprises SEQ ID NO:14. In some embodiments, the bicistronic iCAR/aCAR comprises SEQ ID NO:16. In some embodiments, the bicistronic iCAR/aCAR comprises SEQ ID NO:18. In some embodiments, the bicistronic iCAR/aCAR comprises SEQ ID NO:20. In some embodiments, the bicistronic iCAR/aCAR comprises SEQ ID NO:22. In some embodiments, the bicistronic iCAR/aCAR comprises SEQ ID NO:24. In some embodiments, the bicistronic iCAR/aCAR comprises SEQ ID NO:26. In some embodiments, the bicistronic iCAR/aCAR comprises SEQ ID NO:28. In some embodiments, the bicistronic iCAR/aCAR comprises SEQ ID NO:30. In some embodiments, the bicistronic iCAR/aCAR comprises SEQ ID NO:32, SEQ ID NO:34. In some embodiments, the bicistronic iCAR/aCAR comprises SEQ ID NO:36. In some embodiments, the bicistronic iCAR/aCAR comprises SEQ ID NO:276. In some embodiments, the bicistronic iCAR/aCAR comprises SEQ ID NO:278. In some embodiments, the bicistronic iCAR/aCAR comprises SEQ ID NO:280. In some embodiments, the bicistronic iCAR/aCAR comprises SEQ ID NO:282. In some embodiments, the bicistronic iCAR/aCAR comprises SEQ ID NO:322. In some embodiments, the bicistronic iCAR/aCAR comprises SEQ ID NO:324. In some embodiments, the bicistronic iCAR/aCAR comprises SEQ ID NO:326.

TABLE 1
Bicistonic iCAR/aCARs: nucleic acid and amino acid sequences

| Sequence | SEQ ID | |
|---|---|---|
| name | NO: | Polynucleotide or polypeptide sequences |
| MC0280- | SEQ ID | ATGGCACTGCCAGTGACCGCCCTGCTGCTGCCTCTGGCCCT |
| BB7.2_28_ | NO: 1 | GCTGCTGCACGCAGCCAGACCCCAGGTGCAGCTGCAGCAGT |
| PD1_HER2 | | CTGGACCTGAGCTGGTGAAGCCAGGAGCCTCCGTGAAGATG |
| Nucleotide | | TCTTGCAAGGCCAGCGGCTACACCTTCACATCTTATCACATC |
| sequence | | CAGTGGGTGAAGCAGCGGCCCGGACAGGGCCTGGAGTGGA |
| (VR280) | | TCGGATGGATCTACCCAGGCGACGGCTCCACACAGTATAAC |
| | | GAGAAGTTCAAGGGCAAGACCACACTGACCGCCGATAAGA |
| | | GCAGCAGCACCGCCTACATGCTGCTGAGCAGCCTGACCAGC |
| | | GAGGACAGCGCCATCTACTTTTGCGCCAGGGAGGGCACATA |
| | | CTATGCTATGGACTATTGGGGCCAGGGCACCAGCGTGACAG |
| | | TGTCTAGCGGAGGAGGAGGCTCCGGAGGAGGAGGCTCTGG |
| | | CGGCGGCGGCAGCGACGTGCTGATGACCCAGACACCACTG |
| | | AGCCTGCCCGTGAGCCTGGGCGATCAGGTGAGCATCTCCTG |
| | | TAGATCCTCTCAGAGCATCGTGCACTCCAACGGCAATACCT |
| | | ACCTGGAGTGGTATCTGCAGAAGCCAGGCCAGTCCCCCAAG |
| | | CTGCTGATCTATAAGGTGTCTAATCGGTTCAGCGGCGTGCCT |
| | | GACAGATTTTCTGGCAGCGGCTCCGGCACCGACTTCACCCT |
| | | GAAGATCAGCCGGGTGGAGGCAGAGGATCTGGGCGTGTAC |
| | | TATTGTTTCCAGGGCTCCCACGTGCCACGCACCTTTGGCGGC |
| | | GGTACCAAGCTGGAGATCAAGATTGAAGTTATGTATCCTCC |
| | | TCCTTACCTAGACAATGAGAAGAGCAATGGAACCATTATCC |
| | | ATGTGAAAGGGAAACACCTTTGTCCAAGTCCCCTATTTCCC |
| | | GGGCCTTCGAAGCCCTTTTGGGTGCTGGTGGTGGTTGGTGG |
| | | AGTCCTGGCTTGCTATAGCTTGCTAGTAACAGTAGCGTTTAT |
| | | TATTTTCTGGGTGTGCAGCAGGGCCGCCCGCGGCACCATCG |
| | | GCGCCAGGCGCACAGGCCAGCCTCTGAAGGAGGACCCTTCC |
| | | GCCGTGCCAGTGTTCTCTGTGGACTACGGCGAGCTGGATTTT |
| | | CAGTGGCGGGAGAAAACCCCAGAGCCACCTGTGCCCTGCGT |
| | | GCCTGAGCAGACCGAGTATGCCACAATCGTGTTTCCATCCG |
| | | GAATGGGCACAAGCTCCCCTGCAAGGAGAGGCAGCGCCGA |
| | | CGGACCACGGTCCGCCCAGCCACTGCGGCCCGAGGATGGCC |
| | | ACTGTTCTTGGCCCCTGCGGAGAAAGCGTGGATCCGGGGAA |
| | | GGCCGAGGCTCCCTTCTAACATGTGGAGATGTCGAGGAAAA |
| | | CCCTGGCCCTATGGCGCTGCCAGTCACTGCATTGTTATTGCC |
| | | TCTGGCCCTGCTTCTCCATGCGGCGCGCCCAGAAGTGCAGC |
| | | TGGTCGAGAGCGGAGGCGGACTGGTTCAACCCGGAGGCAG |
| | | CTTGAGACTGTCCTGCGCGGCCAGCGGCTTCAACATCAAGG |
| | | ATACCTATATCCACTGGGTGAGGCAGGCTCCAGGAAAGGGC |
| | | CTGGAGTGGGTGGCAAGGATTTACCCTACTAATGGATATAC |
| | | ACGCTACGCTGATTCCGTGAAGGGACGCTTTACAATCTCAG |
| | | CAGATACATCCAAAAACACGGCCTATTTACAGATGAATAGT |
| | | TTGCGGGCCGAAGACACGGCTGTATACTATTGTTCTCGGTG |
| | | GGGGGGCGATGGATTTTATGCGATGGATTACTGGGGCCAGG |
| | | GCACCCTGGTAACCGTGTCAAGCGGCTCAACATCCGGGTCC |
| | | GGTAAGCCGGGCTCCGGCGAGGGGTCTACAAAGGGAGATA |
| | | TACAGATGACACAGTCCCCCAGTTCCCTGTCCGCCTCAGTG |
| | | GGAGACCGAGTGACGATTACCTGTCGTGCCAGCCAGGACGT |
| | | CAATACCGCCGTCGCTTGGTATCAGCAAAAACCAGGCAAGG |
| | | CCCCGAAACTATTGATCTACAGTGCCTCTTTTCTGTACTCCG |
| | | GGGTGCCGAGCAGATTTAGTGGCTCCAGGAGCGGAACCGAT |
| | | TTCACCCTAACCATTTCCAGTTTGCAGCCAGAGGATTTCGCG |
| | | ACCTATTACTGCCAGCAACACTACACCACACCGCCAACTTT |
| | | CGGACAAGGAACCAAGGTTGAAATCAAAACTACGACCCCA |
| | | GCACCTAGACCTCCCACCCCAGCTCCAACTATAGCTTCCCA |
| | | GCCATTGTCTCTCCGGCCAGAGGCGTGTCGACCAGCCGCTG |
| | | GAGGGGCCGTTCATACAAGAGGACTCGATTTCGCTTGCGAT |
| | | ATCTACATATGGGCCCCTCTTGCCGGGACATGCGGTGTCCT |
| | | GCTTCTAAGCTTGGTTATTACCCTCTATTGCAAACGCGGCCG |
| | | CAAGAAACTGCTCTACATCTTTAAACAGCCGTTCATGAGGC |
| | | CTGTGCAGACAACGCAGGAAGAGGATGGCTGTAGTTGTCGG |
| | | TTTCCGGAAGAGGAAGAGGGGGGCTGCGAGTTGCGTGTCA |
| | | AATTTTCTCGGTCTGCCGACGCCCCCGCGTACCAGCAAGGG |
| | | CAGAACCAGCTTTATAATGAGCTGAATCTTGGACGACGGGA |
| | | GGAATATGACGTGCTTGACAAGAGGCGAGGTAGGGACCCT |
| | | GAGATGGGGGGAAAACCTCGGAGGAAAAACCCACAGGAAG |
| | | GCCTGTATAACGAACTGCAGAAGGACAAGATGGCTGAAGC |
| | | CTACTCTGAGATTGGAATGAAAGGGGAACGCAGACGCGGC |
| | | AAGGGCCATGATGGCCTCTACCAAGGTCTAAGCACTGCCAC |
| | | CAAGGACACCTATGACGCACTCCACATGCAAGCTCTACCTC |
| | | CCCGTTGATAA |
| MC0280- | SEQ ID | MALPVTALLLPLALLLHAARPQVQLQQSGPELVKPGASVKMS |
| BB7.2_28_ | NO: 2 | CKASGYTFTSYHIQWVKQRPGQGLEWIGWIYPGDGSTQYNEK |
| PD1_HER2 | | FKGKTTLTADKSSSTAYMLLSSLTSEDSAIYFCAREGTYYAMD |
| Protein | | YWGQGTSVTVSSGGGGSGGGGSGGGGSDVLMTQTPLSLPVSL |
| sequence | | GDQVSISCRSSQSIVHSNGNTYLEWYLQKPGQSPKLLIYKVSNR |
| (VR280) | | FSGVPDRESGSGSGTDFTLKISRVEAEDLGVYYCFQGSHVPRTF |
| | | GGGTKLEIKIEVMYPPPYLDNEKSNGTIIHVKGKHLCPSPLFPG |
| | | PSKPFWVLVVVGGVLACYSLLVTVAFIIFWVCSRAARGTIGAR |
| | | RTGQPLKEDPSAVPVFSVDYGELDFQWREKTPEPPVPCVPEQT |
| | | EYATIVFPSGMGTSSPARRGSADGPRSAQPLRPEDGHCSWPLR |
| | | RKRGSGEGRGSLLTCGDVEENPGPMALPVTALLLPLALLLHAA |
| | | RPEVQLVESGGGLVQPGGSLRLSCAASGFNIKDTYIHWVRQAP |
| | | GKGLEWVARIYPTNGYTRYADSVKGRFTISADTSKNTAYLQM |
| | | NSLRAEDTAVYYCSRWGGDGFYAMDYWGQGTLVTVSSGSTS |
| | | GSGKPGSGEGSTKGDIQMTQSPSSLSASVGDRVTITCRASQDV |
| | | NTAVAWYQQKPGKAPKLLIYSASFLYSGVPSRFSGSRSGTDFT |
| | | LTISSLQPEDFATYYCQQHYTTPPTFGQGTKVEIKTTTPAPRPPT |
| | | PAPTIASQPLSLRPEACRPAAGGAVHTRGLDFACDIYIWAPLAG |
| | | TCGVLLLSLVITLYCKRGRKKLLYIFKQPFMRPVQTTQEEDGC |
| | | SCRFPEEEEGGCELRVKESRSADAPAYQQGQNQLYNELNLGR |
| | | REEYDVLDKRRGRDPEMGGKPRRKNPQEGLYNELQKDKMAE |
| | | AYSEIGMKGERRRGKGHDGLYQGLSTATKDTYDALHMQALP |
| | | PR |
| MC0281- | SEQ ID | ATGGCACTGCCAGTGACCGCCCTGCTGCTGCCTCTGGCCCT |
| BB7.2_28_ | NO: 3 | GCTGCTGCACGCAGCCAGACCCCAGGTGCAGCTGCAGCAGT |
| PD1_EGFR | | CTGGACCTGAGCTGGTGAAGCCAGGAGCCTCCGTGAAGATG |
| nucleotide | | TCTTGCAAGGCCAGCGGCTACACCTTCACATCTTATCACATC |
| Sequence | | CAGTGGGTGAAGCAGCGGCCCGGACAGGGCCTGGAGTGGA |
| (VR281) | | TCGGATGGATCTACCCAGGCGACGGCTCCACACAGTATAAC |
| | | GAGAAGTTCAAGGGCAAGACCACACTGACCGCCGATAAGA |
| | | GCAGCAGCACCGCCTACATGCTGCTGAGCAGCCTGACCAGC |
| | | GAGGACAGCGCCATCTACTTTTGCGCCAGGGAGGGCACATA |
| | | CTATGCTATGGACTATTGGGGCCAGGGCACCAGCGTGACAG |
| | | TGTCTAGCGGAGGAGGAGGCTCCGGAGGAGGAGGCTCTGG |
| | | CGGCGGCGGCAGCGACGTGCTGATGACCCAGACACCACTG |
| | | AGCCTGCCCGTGAGCCTGGGCGATCAGGTGAGCATCTCCTG |
| | | TAGATCCTCTCAGAGCATCGTGCACTCCAACGGCAATACCT |
| | | ACCTGGAGTGGTATCTGCAGAAGCCAGGCCAGTCCCCCAAG |
| | | CTGCTGATCTATAAGGTGTCTAATCGGTTCAGCGGCGTGCCT |
| | | GACAGATTTTCTGGCAGCGGCTCCGGCACCGACTTCACCCT |
| | | GAAGATCAGCCGGGTGGAGGCAGAGGATCTGGGCGTGTAC |
| | | TATTGTTTCCAGGGCTCCCACGTGCCACGCACCTTTGGCGGC |
| | | GGTACCAAGCTGGAGATCAAGATTGAAGTTATGTATCCTCC |
| | | TCCTTACCTAGACAATGAGAAGAGCAATGGAACCATTATCC |
| | | ATGTGAAAGGGAAACACCTTTGTCCAAGTCCCCTATTTCCC |
| | | GGGCCTTCGAAGCCCTTTTGGGTGCTGGTGGTGGTTGGTGG |
| | | AGTCCTGGCTTGCTATAGCTTGCTAGTAACAGTAGCGTTTAT |
| | | TATTTTCTGGGTGTGCAGCAGGGCCGCCCGCGGCACCATCG |
| | | GCGCCAGGCGCACAGGCCAGCCTCTGAAGGAGGACCCTTCC |
| | | GCCGTGCCAGTGTTCTCTGTGGACTACGGCGAGCTGGATTTT |
| | | CAGTGGCGGGAGAAAACCCCAGAGCCACCTGTGCCCTGCGT |
| | | GCCTGAGCAGACCGAGTATGCCACAATCGTGTTTCCATCCG |
| | | GAATGGGCACAAGCTCCCCTGCAAGGAGAGGCAGCGCCGA |
| | | CGGACCACGGTCCGCCCAGCCACTGCGGCCCGAGGATGGCC |
| | | ACTGTTCTTGGCCCCTGCGGAGAAAGCGTGGATCCGGGGAA |
| | | GGCCGAGGCTCCCTTCTAACATGTGGAGATGTCGAGGAAAA |
| | | CCCTGGCCCTATGGCGCTGCCAGTCACTGCATTGTTATTGCC |
| | | TCTGGCCCTGCTTCTCCATGCGGCGCGCCCACAAGTGCAGC |
| | | TGAAACAGAGCGGACCAGGACTGGTTCAACCCAGCCAGAG |
| | | CTTGAGCATCACGTGCACGGTTAGCGGCTTCAGTCTGACCA |
| | | ATTATGGTGTGCACTGGGTGAGGCAGTCTCCAGGAAAGGGC |
| | | CTGGAGTGGCTTGGAGTCATTTGGAGCGGTGGGAATACAGA |
| | | TTACAATACACCTTTTACGTCACGTCTCTCCATTAACAAGGA |
| | | CAACTCCAAATCCCAAGTATTTTTCAAAATGAATAGCCTGC |
| | | AGAGTAATGATACCGCCATCTATTACTGTGCACGAGCTTTG |
| | | ACATATTACGACTATGAATTTGCCTATTGGGGTCAAGGCAC |
| | | GCTGGTGACCGTATCAGGCTCAACATCCGGGTCCGGTAAGC |
| | | CGGGCTCCGGCGAGGGGTCTACAAAGGGAGACATCCTTCTG |
| | | ACACAGAGCCCCGTGATCCTGTCCGTGTCCCCCGGCGAGAG |
| | | AGTATCATTTTCCTGTAGGGCTTCTCAGAGCATCGGAACAA |
| | | ATATCCACTGGTATCAGCAACGGACTAACGGATCACCTCGC |
| | | CTGCTCATAAAGTACGCCAGTGAATCTATTAGTGGCATACC |
| | | GAGCCGCTTCAGCGGGAGTGGCTCCGGCACAGACTTTACTC |
| | | TGAGTATAAATTCCGTGGAATCTGAGGACATCGCGGACTAT |
| | | TACTGCCAGCAAAACAATAACTGGCCCACCACGTTCGGCGC |
| | | GGGAACTAAACTAGAACTAAAGACTACGACCCCAGCACCT |
| | | AGACCTCCCACCCCAGCTCCAACTATAGCTTCCCAGCCATT |
| | | GTCTCTCCGGCCAGAGGCGTGTCGACCAGCCGCTGGAGGGG |
| | | CCGTTCATACAAGAGGACTCGATTTCGCTTGCGATATCTAC |
| | | ATATGGGCCCCTCTTGCCGGGACATGCGGTGTCCTGCTTCTA |
| | | AGCTTGGTTATTACCCTCTATTGCAAACGCGGCCGCAAGAA |
| | | ACTGCTCTACATCTTTAAACAGCCGTTCATGAGGCCTGTGCA |
| | | GACAACGCAGGAAGAGGATGGCTGTAGTTGTCGGTTTCCGG |
| | | AAGAGGAAGAGGGGGGCTGCGAGTTGCGTGTCAAATTTTCT |
| | | CGGTCTGCCGACGCCCCCGCGTACCAGCAAGGGCAGAACCA |
| | | GCTTTATAATGAGCTGAATCTTGGACGACGGGAGGAATATG |
| | | ACGTGCTTGACAAGAGGCGAGGTAGGGACCCTGAGATGGG |
| | | GGGAAAACCTCGGAGGAAAAACCCACAGGAAGGCCTGTAT |
| | | AACGAACTGCAGAAGGACAAGATGGCTGAAGCCTACTCTG |
| | | AGATTGGAATGAAAGGGGAACGCAGACGCGGCAAGGGCCA |
| | | TGATGGCCTCTACCAAGGTCTAAGCACTGCCACCAAGGACA |
| | | CCTATGACGCACTCCACATGCAAGCTCTACCTCCCCGTTGAT |
| | | AA |
| MC0281- | SEQ ID | MALPVTALLLPLALLLHAARPQVQLQQSGPELVKPGASVKMS |
| BB7.2_28_ | NO: 4 | CKASGYTFTSYHIQWVKQRPGQGLEWIGWIYPGDGSTQYNEK |
| PD1_EGFR | | FKGKTTLTADKSSSTAYMLLSSLTSEDSAIYFCAREGTYYAMD |
| Protein | | YWGQGTSVTVSSGGGGSGGGGSGGGGSDVLMTQTPLSLPVSL |
| Sequence | | GDQVSISCRSSQSIVHSNGNTYLEWYLQKPGQSPKLLIYKVSNR |
| (VR281) | | FSGVPDRFSGSGSGTDFTLKISRVEAEDLGVYYCFQGSHVPRTF |
| | | GGGTKLEIKIEVMYPPPYLDNEKSNGTIIHVKGKHLCPSPLFPG |
| | | PSKPFWVLVVVGGVLACYSLLVTVAFIIFWVCSRAARGTIGAR |
| | | RTGQPLKEDPSAVPVFSVDYGELDFQWREKTPEPPVPCVPEQT |
| | | EYATIVFPSGMGTSSPARRGSADGPRSAQPLRPEDGHCSWPLR |
| | | RKRGSGEGRGSLLTCGDVEENPGPMALPVTALLLPLALLLHAA |
| | | RPQVQLKQSGPGLVQPSQSLSITCTVSGFSLTNYGVHWVRQSP |
| | | GKGLEWLGVIWSGGNTDYNTPFTSRLSINKDNSKSQVFFKMN |
| | | SLQSNDTAIYYCARALTYYDYEFAYWGQGTLVTVSGSTSGSG |
| | | KPGSGEGSTKGDILLTQSPVILSVSPGERVSFSCRASQSIGTNIH |
| | | WYQQRTNGSPRLLIKYASESISGIPSRFSGSGSGTDFTLSINSVES |
| | | EDIADYYCQQNNNWPTTFGAGTKLELKTTTPAPRPPTPAPTIAS |
| | | QPLSLRPEACRPAAGGAVHTRGLDFACDIYIWAPLAGTCGVLL |
| | | LSLVITLYCKRGRKKLLYIFKQPFMRPVQTTQEEDGCSCRFPEE |
| | | EEGGCELRVKFSRSADAPAYQQGQNQLYNELNLGRREEYDVL |
| | | DKRRGRDPEMGGKPRRKNPQEGLYNELQKDKMAEAYSEIGM |
| | | KGERRRGKGHDGLYQGLSTATKDTYDALHMQALPPR |
| MC0282- | SEQ ID | ATGGCACTGCCAGTGACCGCCCTGCTGCTGCCTCTGGCCCT |
| 3PF12_28_ | NO: 5 | GCTGCTGCACGCAGCCAGACCCCAAGTGCAACTAGTCCAAT |
| PD1_HER2 | | CAGGTGGAGGCGTCGTGCAACCTGGAGGGTCCCTCCGCGTT |
| Nucleotide | | AGCTGCGCCGCATCAGGCGTTACCTTGTCAGACTACGGCAT |
| Sequence | | GCATTGGGTTAGGCAAGCCCCCGGCAAGGGGCTCGAATGG |
| (VR282) | | ATGGCTTTCATTCGGAATGACGGGAGCGATAAATATTACGC |
| | | GGATTCAGTTAAAGGGCGGTTCACCATCAGCCGCGACAATA |
| | | GCAAAAAGACGGTCTCCTTACAGATGTCCAGCTTGCGGGCC |
| | | GAAGACACGGCTGTATACTATTGTGCTAAAAATGGCGAGAG |
| | | CGGCCCCCTGGATTACTGGTACTTTGACCTGTGGGGCAGAG |
| | | GCACCCTGGTCACGGTGTCCTCTGGAGGAGGAGGCTCCGGA |
| | | GGAGGAGGCTCTGGCGGCGGCGGCAGCGACATTGTAATGA |
| | | CCCAGTCACCCTCCTTCCTTAGTGCCTCAGTCGGAGACCGCG |
| | | TGACTATCACTTGTCGTGCCTCACACGGAATTAATAACTACC |
| | | TCGCTTGGTATCAGCAAAAACCAGGCAAGGCCCCGAAACTA |
| | | TTGATCTACGCCGCATCTACTCTGCAGAGCGGAGTACCGAG |
| | | CAGATTTAGTGGTTCCGGCAGCGGAACCGAGTTCACCCTAA |
| | | CCATTTCCAGTTTGCAGCCAGAGGATTTCGCGACCTATTACT |
| | | GCCAGCAATACGATTCATACCCGCCAACTTTCGGAAGAGGT |
| | | ACCAAGGTTGAAATCAAGATTGAAGTTATGTATCCTCCTCC |
| | | TTACCTAGACAATGAGAAGAGCAATGGAACCATTATCCATG |
| | | TGAAAGGGAAACACCTTTGTCCAAGTCCCCTATTTCCCGGG |
| | | CCTTCGAAGCCCTTTTGGGTGCTGGTGGTGGTTGGTGGAGTC |
| | | CTGGCTTGCTATAGCTTGCTAGTAACAGTAGCGTTTATTATT |
| | | TTCTGGGTGTGCAGCAGGGCCGCCCGCGGCACCATCGGCGC |
| | | CAGGCGCACAGGCCAGCCTCTGAAGGAGGACCCTTCCGCCG |
| | | TGCCAGTGTTCTCTGTGGACTACGGCGAGCTGGATTTTCAGT |
| | | GGCGGGAGAAAACCCCAGAGCCACCTGTGCCCTGCGTGCCT |
| | | GAGCAGACCGAGTATGCCACAATCGTGTTTCCATCCGGAAT |
| | | GGGCACAAGCTCCCCTGCAAGGAGAGGCAGCGCCGACGGA |
| | | CCACGGTCCGCCCAGCCACTGCGGCCCGAGGATGGCCACTG |
| | | TTCTTGGCCCCTGCGGAGAAAGCGTGGATCCGGGGAAGGCC |
| | | GAGGCTCCCTTCTAACATGTGGAGATGTCGAGGAAAACCCT |
| | | GGCCCTATGGCGCTGCCAGTCACTGCATTGTTATTGCCTCTG |
| | | GCCCTGCTTCTCCATGCGGCGCGCCCAGAAGTGCAGCTGGT |
| | | CGAGAGCGGAGGCGGACTGGTTCAACCCGGAGGCAGCTTG |
| | | AGACTGTCCTGCGCGGCCAGCGGCTTCAACATCAAGGATAC |
| | | CTATATCCACTGGGTGAGGCAGGCTCCAGGAAAGGGCCTGG |
| | | AGTGGGTGGCAAGGATTTACCCTACTAATGGATATACACGC |
| | | TACGCTGATTCCGTGAAGGGACGCTTTACAATCTCAGCAGA |
| | | TACATCCAAAAACACGGCCTATTTACAGATGAATAGTTTGC |
| | | GGGCCGAAGACACGGCTGTATACTATTGTTCTCGGTGGGGG |
| | | GGCGATGGATTTTATGCGATGGATTACTGGGGCCAGGGCAC |
| | | CCTGGTAACCGTGTCAAGCGGCTCAACATCCGGGTCCGGTA |
| | | AGCCGGGCTCCGGCGAGGGGTCTACAAAGGGAGATATACA |
| | | GATGACACAGTCCCCCAGTTCCCTGTCCGCCTCAGTGGGAG |
| | | ACCGAGTGACGATTACCTGTCGTGCCAGCCAGGACGTCAAT |
| | | ACCGCCGTCGCTTGGTATCAGCAAAAACCAGGCAAGGCCCC |
| | | GAAACTATTGATCTACAGTGCCTCTTTTCTGTACTCCGGGGT |
| | | GCCGAGCAGATTTAGTGGCTCCAGGAGCGGAACCGATTTCA |
| | | CCCTAACCATTTCCAGTTTGCAGCCAGAGGATTTCGCGACCT |
| | | ATTACTGCCAGCAACACTACACCACACCGCCAACTTTCGGA |
| | | CAAGGAACCAAGGTTGAAATCAAAACTACGACCCCAGCAC |
| | | CTAGACCTCCCACCCCAGCTCCAACTATAGCTTCCCAGCCAT |
| | | TGTCTCTCCGGCCAGAGGCGTGTCGACCAGCCGCTGGAGGG |
| | | GCCGTTCATACAAGAGGACTCGATTTCGCTTGCGATATCTA |
| | | CATATGGGCCCCTCTTGCCGGGACATGCGGTGTCCTGCTTCT |
| | | AAGCTTGGTTATTACCCTCTATTGCAAACGCGGCCGCAAGA |
| | | AACTGCTCTACATCTTTAAACAGCCGTTCATGAGGCCTGTGC |
| | | AGACAACGCAGGAAGAGGATGGCTGTAGTTGTCGGTTTCCG |
| | | GAAGAGGAAGAGGGGGGCTGCGAGTTGCGTGTCAAATTTTC |
| | | TCGGTCTGCCGACGCCCCCGCGTACCAGCAAGGGCAGAACC |
| | | AGCTTTATAATGAGCTGAATCTTGGACGACGGGAGGAATAT |
| | | GACGTGCTTGACAAGAGGCGAGGTAGGGACCCTGAGATGG |
| | | GGGGAAAACCTCGGAGGAAAAACCCACAGGAAGGCCTGTA |
| | | TAACGAACTGCAGAAGGACAAGATGGCTGAAGCCTACTCTG |
| | | AGATTGGAATGAAAGGGGAACGCAGACGCGGCAAGGGCCA |
| | | TGATGGCCTCTACCAAGGTCTAAGCACTGCCACCAAGGACA |
| | | CCTATGACGCACTCCACATGCAAGCTCTACCTCCCCGTTGAT |
| | | AA |
| MC0282- | SEQ ID | MALPVTALLLPLALLLHAARPQVQLVQSGGGVVQPGGSLRVS |
| 3PF12_28_ | NO: 6 | CAASGVTLSDYGMHWVRQAPGKGLEWMAFIRNDGSDKYYA |
| PD1_HER2 | | DSVKGRFTISRDNSKKTVSLQMSSLRAEDTAVYYCAKNGESGP |
| Protein | | LDYWYFDLWGRGTLVTVSSGGGGSGGGGSGGGGSDIVMTQS |
| Sequence | | PSFLSASVGDRVTITCRASHGINNYLAWYQQKPGKAPKLLIYA |
| (VR282) | | ASTLQSGVPSRESGSGSGTEFTLTISSLQPEDFATYYCQQYDSY |
| | | PPTFGRGTKVEIKIEVMYPPPYLDNEKSNGTIIHVKGKHLCPSPL |
| | | FPGPSKPFWVLVVVGGVLACYSLLVTVAFIIFWVCSRAARGTI |
| | | GARRTGQPLKEDPSAVPVFSVDYGELDFQWREKTPEPPVPCVP |
| | | EQTEYATIVFPSGMGTSSPARRGSADGPRSAQPLRPEDGHCSW |
| | | PLRRKRGSGEGRGSLLTCGDVEENPGPMALPVTALLLPLALLL |
| | | HAARPEVQLVESGGGLVQPGGSLRLSCAASGFNIKDTYIHWVR |
| | | QAPGKGLEWVARIYPTNGYTRYADSVKGRFTISADTSKNTAY |
| | | LQMNSLRAEDTAVYYCSRWGGDGFYAMDYWGQGTLVTVSS |
| | | GSTSGSGKPGSGEGSTKGDIQMTQSPSSLSASVGDRVTITCRAS |
| | | QDVNTAVAWYQQKPGKAPKLLIYSASFLYSGVPSRFSGSRSGT |
| | | DFTLTISSLQPEDFATYYCQQHYTTPPTFGQGTKVEIKTTTPAP |
| | | RPPTPAPTIASQPLSLRPEACRPAAGGAVHTRGLDFACDIYIWA |
| | | PLAGTCGVLLLSLVITLYCKRGRKKLLYIFKQPFMRPVQTTQEE |
| | | DGCSCRFPEEEEGGCELRVKFSRSADAPAYQQGQNQLYNELN |
| | | LGRREEYDVLDKRRGRDPEMGGKPRRKNPQEGLYNELQKDK |
| | | MAEAYSEIGMKGERRRGKGHDGLYQGLSTATKDTYDALHMQ |
| | | ALPPR |
| MC0283- | SEQ ID | ATGGCACTGCCAGTGACCGCCCTGCTGCTGCCTCTGGCCCT |
| 3PF12_28_ | NO: 7 | GCTGCTGCACGCAGCCAGACCCCAAGTGCAACTAGTCCAAT |
| PD1_EGFR | | CAGGTGGAGGCGTCGTGCAACCTGGAGGGTCCCTCCGCGTT |
| Nucleotide | | AGCTGCGCCGCATCAGGCGTTACCTTGTCAGACTACGGCAT |
| Sequence | | GCATTGGGTTAGGCAAGCCCCCGGCAAGGGGCTCGAATGG |
| (VR283) | | ATGGCTTTCATTCGGAATGACGGGAGCGATAAATATTACGC |
| | | GGATTCAGTTAAAGGGCGGTTCACCATCAGCCGCGACAATA |
| | | GCAAAAAGACGGTCTCCTTACAGATGTCCAGCTTGCGGGCC |
| | | GAAGACACGGCTGTATACTATTGTGCTAAAAATGGCGAGAG |
| | | CGGCCCCCTGGATTACTGGTACTTTGACCTGTGGGGCAGAG |
| | | GCACCCTGGTCACGGTGTCCTCTGGAGGAGGAGGCTCCGGA |
| | | GGAGGAGGCTCTGGCGGCGGCGGCAGCGACATTGTAATGA |
| | | CCCAGTCACCCTCCTTCCTTAGTGCCTCAGTCGGAGACCGCG |
| | | TGACTATCACTTGTCGTGCCTCACACGGAATTAATAACTACC |
| | | TCGCTTGGTATCAGCAAAAACCAGGCAAGGCCCCGAAACTA |
| | | TTGATCTACGCCGCATCTACTCTGCAGAGCGGAGTACCGAG |
| | | CAGATTTAGTGGTTCCGGCAGCGGAACCGAGTTCACCCTAA |
| | | CCATTTCCAGTTTGCAGCCAGAGGATTTCGCGACCTATTACT |
| | | GCCAGCAATACGATTCATACCCGCCAACTTTCGGAAGAGGT |
| | | ACCAAGGTTGAAATCAAGATTGAAGTTATGTATCCTCCTCC |
| | | TTACCTAGACAATGAGAAGAGCAATGGAACCATTATCCATG |
| | | TGAAAGGGAAACACCTTTGTCCAAGTCCCCTATTTCCCGGG |
| | | CCTTCGAAGCCCTTTTGGGTGCTGGTGGTGGTTGGTGGAGTC |
| | | CTGGCTTGCTATAGCTTGCTAGTAACAGTAGCGTTTATTATT |
| | | TTCTGGGTGTGCAGCAGGGCCGCCCGCGGCACCATCGGCGC |
| | | CAGGCGCACAGGCCAGCCTCTGAAGGAGGACCCTTCCGCCG |
| | | TGCCAGTGTTCTCTGTGGACTACGGCGAGCTGGATTTTCAGT |
| | | GGCGGGAGAAAACCCCAGAGCCACCTGTGCCCTGCGTGCCT |
| | | GAGCAGACCGAGTATGCCACAATCGTGTTTCCATCCGGAAT |
| | | GGGCACAAGCTCCCCTGCAAGGAGAGGCAGCGCCGACGGA |
| | | CCACGGTCCGCCCAGCCACTGCGGCCCGAGGATGGCCACTG |
| | | TTCTTGGCCCCTGCGGAGAAAGCGTGGATCCGGGGAAGGCC |
| | | GAGGCTCCCTTCTAACATGTGGAGATGTCGAGGAAAACCCT |
| | | GGCCCTATGGCGCTGCCAGTCACTGCATTGTTATTGCCTCTG |
| | | GCCCTGCTTCTCCATGCGGCGCGCCCACAAGTGCAGCTGAA |
| | | ACAGAGCGGACCAGGACTGGTTCAACCCAGCCAGAGCTTG |
| | | AGCATCACGTGCACGGTTAGCGGCTTCAGTCTGACCAATTA |
| | | TGGTGTGCACTGGGTGAGGCAGTCTCCAGGAAAGGGCCTGG |
| | | AGTGGCTTGGAGTCATTTGGAGCGGTGGGAATACAGATTAC |
| | | AATACACCTTTTACGTCACGTCTCTCCATTAACAAGGACAA |
| | | CTCCAAATCCCAAGTATTTTTCAAAATGAATAGCCTGCAGA |
| | | GTAATGATACCGCCATCTATTACTGTGCACGAGCTTTGACAT |
| | | ATTACGACTATGAATTTGCCTATTGGGGTCAAGGCACGCTG |
| | | GTGACCGTATCAGGCTCAACATCCGGGTCCGGTAAGCCGGG |
| | | CTCCGGCGAGGGGTCTACAAAGGGAGACATCCTTCTGACAC |
| | | AGAGCCCCGTGATCCTGTCCGTGTCCCCCGGCGAGAGAGTA |
| | | TCATTTTCCTGTAGGGCTTCTCAGAGCATCGGAACAAATATC |
| | | CACTGGTATCAGCAACGGACTAACGGATCACCTCGCCTGCT |
| | | CATAAAGTACGCCAGTGAATCTATTAGTGGCATACCGAGCC |
| | | GCTTCAGCGGGAGTGGCTCCGGCACAGACTTTACTCTGAGT |
| | | ATAAATTCCGTGGAATCTGAGGACATCGCGGACTATTACTG |
| | | CCAGCAAAACAATAACTGGCCCACCACGTTCGGCGCGGGA |
| | | ACTAAACTAGAACTAAAGACTACGACCCCAGCACCTAGACC |
| | | TCCCACCCCAGCTCCAACTATAGCTTCCCAGCCATTGTCTCT |
| | | CCGGCCAGAGGCGTGTCGACCAGCCGCTGGAGGGGCCGTTC |
| | | ATACAAGAGGACTCGATTTCGCTTGCGATATCTACATATGG |
| | | GCCCCTCTTGCCGGGACATGCGGTGTCCTGCTTCTAAGCTTG |
| | | GTTATTACCCTCTATTGCAAACGCGGCCGCAAGAAACTGCT |
| | | CTACATCTTTAAACAGCCGTTCATGAGGCCTGTGCAGACAA |
| | | CGCAGGAAGAGGATGGCTGTAGTTGTCGGTTTCCGGAAGAG |
| | | GAAGAGGGGGGCTGCGAGTTGCGTGTCAAATTTTCTCGGTC |
| | | TGCCGACGCCCCCGCGTACCAGCAAGGGCAGAACCAGCTTT |
| | | ATAATGAGCTGAATCTTGGACGACGGGAGGAATATGACGTG |
| | | CTTGACAAGAGGCGAGGTAGGGACCCTGAGATGGGGGGAA |
| | | AACCTCGGAGGAAAAACCCACAGGAAGGCCTGTATAACGA |
| | | ACTGCAGAAGGACAAGATGGCTGAAGCCTACTCTGAGATTG |
| | | GAATGAAAGGGGAACGCAGACGCGGCAAGGGCCATGATGG |
| | | CCTCTACCAAGGTCTAAGCACTGCCACCAAGGACACCTATG |
| | | ACGCACTCCACATGCAAGCTCTACCTCCCCGTTGATAA |
| MC0283- | SEQ ID | MALPVTALLLPLALLLHAARPQVQLVQSGGGVVQPGGSLRVS |
| 3PF12_28_ | NO: 8 | CAASGVTLSDYGMHWVRQAPGKGLEWMAFIRNDGSDKYYA |
| PD1_EGFR | | DSVKGRFTISRDNSKKTVSLQMSSLRAEDTAVYYCAKNGESGP |
| Protein | | LDYWYFDLWGRGTLVTVSSGGGGSGGGGSGGGGSDIVMTQS |
| Sequence | | PSFLSASVGDRVTITCRASHGINNYLAWYQQKPGKAPKLLIYA |
| (VR283) | | ASTLQSGVPSRESGSGSGTEFTLTISSLQPEDFATYYCQQYDSY |
| | | PPTFGRGTKVEIKIEVMYPPPYLDNEKSNGTIIHVKGKHLCPSPL |
| | | FPGPSKPFWVLVVVGGVLACYSLLVTVAFIIFWVCSRAARGTI |
| | | GARRTGQPLKEDPSAVPVFSVDYGELDFQWREKTPEPPVPCVP |
| | | EQTEYATIVFPSGMGTSSPARRGSADGPRSAQPLRPEDGHCSW |
| | | PLRRKRGSGEGRGSLLTCGDVEENPGPMALPVTALLLPLALLL |
| | | HAARPQVQLKQSGPGLVQPSQSLSITCTVSGFSLTNYGVHWVR |
| | | QSPGKGLEWLGVIWSGGNTDYNTPFTSRLSINKDNSKSQVFFK |
| | | MNSLQSNDTAIYYCARALTYYDYEFAYWGQGTLVTVSGSTSG |
| | | SGKPGSGEGSTKGDILLTQSPVILSVSPGERVSFSCRASQSIGTNI |
| | | HWYQQRTNGSPRLLIKYASESISGIPSRFSGSGSGTDFTLSINSV |
| | | ESEDIADYYCQQNNNWPTTFGAGTKLELKTTTPAPRPPTPAPTI |
| | | ASQPLSLRPEACRPAAGGAVHTRGLDFACDIYIWAPLAGTCGV |
| | | LLLSLVITLYCKRGRKKLLYIFKQPFMRPVQTTQEEDGCSCRFP |
| | | EEEEGGCELRVKFSRSADAPAYQQGQNQLYNELNLGRREEYD |
| | | VLDKRRGRDPEMGGKPRRKNPQEGLYNELQKDKMAEAYSEI |
| | | GMKGERRRGKGHDGLYQGLSTATKDTYDALHMQALPPR |
| MC0284- | SEQ ID | ATGGCACTGCCAGTGACCGCCCTGCTGCTGCCTCTGGCCCT |
| BB7.2_8_ | NO: 9 | GCTGCTGCACGCAGCCAGACCCCAGGTGCAGCTGCAGCAGT |
| PD1_HER2 | | CTGGACCTGAGCTGGTGAAGCCAGGAGCCTCCGTGAAGATG |
| Nucleotide | | TCTTGCAAGGCCAGCGGCTACACCTTCACATCTTATCACATC |
| Sequence | | CAGTGGGTGAAGCAGCGGCCCGGACAGGGCCTGGAGTGGA |
| (VR284) | | TCGGATGGATCTACCCAGGCGACGGCTCCACACAGTATAAC |
| | | GAGAAGTTCAAGGGCAAGACCACACTGACCGCCGATAAGA |
| | | GCAGCAGCACCGCCTACATGCTGCTGAGCAGCCTGACCAGC |
| | | GAGGACAGCGCCATCTACTTTTGCGCCAGGGAGGGCACATA |
| | | CTATGCTATGGACTATTGGGGCCAGGGCACCAGCGTGACAG |
| | | TGTCTAGCGGAGGAGGAGGCTCCGGAGGAGGAGGCTCTGG |
| | | CGGCGGCGGCAGCGACGTGCTGATGACCCAGACACCACTG |
| | | AGCCTGCCCGTGAGCCTGGGCGATCAGGTGAGCATCTCCTG |
| | | TAGATCCTCTCAGAGCATCGTGCACTCCAACGGCAATACCT |
| | | ACCTGGAGTGGTATCTGCAGAAGCCAGGCCAGTCCCCCAAG |
| | | CTGCTGATCTATAAGGTGTCTAATCGGTTCAGCGGCGTGCCT |
| | | GACAGATTTTCTGGCAGCGGCTCCGGCACCGACTTCACCCT |
| | | GAAGATCAGCCGGGTGGAGGCAGAGGATCTGGGCGTGTAC |
| | | TATTGTTTCCAGGGCTCCCACGTGCCACGCACCTTTGGCGGC |
| | | GGTACCAAGCTGGAGATCAAGACTACGACCCCAGCACCTAG |
| | | ACCTCCCACCCCAGCTCCAACTATAGCTTCCCAGCCATTGTC |
| | | TCTCCGGCCAGAGGCGTGTCGACCAGCCGCTGGAGGGGCCG |
| | | TTCATACAAGAGGACTCGATTTCGCTTGCGATATCTACATAT |
| | | GGGCCCCTCTTGCCGGGACATGCGGTGTCCTGCTTCTAAGCT |
| | | TGGTTATTACCCTCTATTGCTGCAGCAGGGCCGCCCGCGGC |
| | | ACCATCGGCGCCAGGCGCACAGGCCAGCCTCTGAAGGAGG |
| | | ACCCTTCCGCCGTGCCAGTGTTCTCTGTGGACTACGGCGAG |
| | | CTGGATTTTCAGTGGCGGGAGAAAACCCCAGAGCCACCTGT |
| | | GCCCTGCGTGCCTGAGCAGACCGAGTATGCCACAATCGTGT |
| | | TTCCATCCGGAATGGGCACAAGCTCCCCTGCAAGGAGAGGC |
| | | AGCGCCGACGGACCACGGTCCGCCCAGCCACTGCGGCCCGA |
| | | GGATGGCCACTGTTCTTGGCCCCTGCGGAGAAAGCGTGGAT |
| | | CCGGGGAAGGCCGAGGCTCCCTTCTAACATGTGGAGATGTC |
| | | GAGGAAAACCCTGGCCCTATGGCGCTGCCAGTCACTGCATT |
| | | GTTATTGCCTCTGGCCCTGCTTCTCCATGCGGCGCGCCCAGA |
| | | AGTGCAGCTGGTCGAGAGCGGAGGCGGACTGGTTCAACCC |
| | | GGAGGCAGCTTGAGACTGTCCTGCGCGGCCAGCGGCTTCAA |
| | | CATCAAGGATACCTATATCCACTGGGTGAGGCAGGCTCCAG |
| | | GAAAGGGCCTGGAGTGGGTGGCAAGGATTTACCCTACTAAT |
| | | GGATATACACGCTACGCTGATTCCGTGAAGGGACGCTTTAC |
| | | AATCTCAGCAGATACATCCAAAAACACGGCCTATTTACAGA |
| | | TGAATAGTTTGCGGGCCGAAGACACGGCTGTATACTATTGT |
| | | TCTCGGTGGGGGGGCGATGGATTTTATGCGATGGATTACTG |
| | | GGGCCAGGGCACCCTGGTAACCGTGTCAAGCGGCTCAACAT |
| | | CCGGGTCCGGTAAGCCGGGCTCCGGCGAGGGGTCTACAAA |
| | | GGGAGATATACAGATGACACAGTCCCCCAGTTCCCTGTCCG |
| | | CCTCAGTGGGAGACCGAGTGACGATTACCTGTCGTGCCAGC |
| | | CAGGACGTCAATACCGCCGTCGCTTGGTATCAGCAAAAACC |
| | | AGGCAAGGCCCCGAAACTATTGATCTACAGTGCCTCTTTTCT |
| | | GTACTCCGGGGTGCCGAGCAGATTTAGTGGCTCCAGGAGCG |
| | | GAACCGATTTCACCCTAACCATTTCCAGTTTGCAGCCAGAG |
| | | GATTTCGCGACCTATTACTGCCAGCAACACTACACCACACC |
| | | GCCAACTTTCGGACAAGGAACCAAGGTTGAAATCAAAATTG |
| | | AAGTTATGTATCCTCCTCCTTACCTAGACAATGAGAAGAGC |
| | | AATGGAACCATTATCCATGTGAAAGGGAAACACCTTTGTCC |
| | | AAGTCCCCTATTTCCCGGGCCTTCGAAGCCCTTTTGGGTGCT |
| | | GGTGGTGGTTGGTGGAGTCCTGGCTTGCTATAGCTTGCTAGT |
| | | AACAGTAGCGTTTATTATTTTCTGGGTGAAACGCGGCCGCA |
| | | AGAAACTGCTCTACATCTTTAAACAGCCGTTCATGAGGCCT |
| | | GTGCAGACAACGCAGGAAGAGGATGGCTGTAGTTGTCGGTT |
| | | TCCGGAAGAGGAAGAGGGGGGCTGCGAGTTGCGTGTCAAA |
| | | TTTTCTCGGTCTGCCGACGCCCCCGCGTACCAGCAAGGGCA |
| | | GAACCAGCTTTATAATGAGCTGAATCTTGGACGACGGGAGG |
| | | AATATGACGTGCTTGACAAGAGGCGAGGTAGGGACCCTGA |
| | | GATGGGGGGAAAACCTCGGAGGAAAAACCCACAGGAAGGC |
| | | CTGTATAACGAACTGCAGAAGGACAAGATGGCTGAAGCCT |
| | | ACTCTGAGATTGGAATGAAAGGGGAACGCAGACGCGGCAA |
| | | GGGCCATGATGGCCTCTACCAAGGTCTAAGCACTGCCACCA |
| | | AGGACACCTATGACGCACTCCACATGCAAGCTCTACCTCCC |
| | | CGTTGATAA |
| MC0284- | SEQ ID | MALPVTALLLPLALLLHAARPQVQLQQSGPELVKPGASVKMS |
| BB7.2_8_ | NO: 10 | CKASGYTFTSYHIQWVKQRPGQGLEWIGWIYPGDGSTQYNEK |
| PD1_HER2 | | FKGKTTLTADKSSSTAYMLLSSLTSEDSAIYFCAREGTYYAMD |
| Protein | | YWGQGTSVTVSSGGGGSGGGGSGGGGSDVLMTQTPLSLPVSL |
| Sequence | | GDQVSISCRSSQSIVHSNGNTYLEWYLQKPGQSPKLLIYKVSNR |
| (VR284) | | FSGVPDRESGSGSGTDFTLKISRVEAEDLGVYYCFQGSHVPRTF |
| | | GGGTKLEIKTTTPAPRPPTPAPTIASQPLSLRPEACRPAAGGAV |
| | | HTRGLDFACDIYIWAPLAGTCGVLLLSLVITLYCCSRAARGTIG |
| | | ARRTGQPLKEDPSAVPVFSVDYGELDFQWREKTPEPPVPCVPE |
| | | QTEYATIVFPSGMGTSSPARRGSADGPRSAQPLRPEDGHCSWP |
| | | LRRKRGSGEGRGSLLTCGDVEENPGPMALPVTALLLPLALLLH |
| | | AARPEVQLVESGGGLVQPGGSLRLSCAASGFNIKDTYIHWVRQ |
| | | APGKGLEWVARIYPTNGYTRYADSVKGRFTISADTSKNTAYL |
| | | QMNSLRAEDTAVYYCSRWGGDGFYAMDYWGQGTLVTVSSG |
| | | STSGSGKPGSGEGSTKGDIQMTQSPSSLSASVGDRVTITCRASQ |
| | | DVNTAVAWYQQKPGKAPKLLIYSASFLYSGVPSRESGSRSGTD |
| | | FTLTISSLQPEDFATYYCQQHYTTPPTFGQGTKVEIKIEVMYPPP |
| | | YLDNEKSNGTIIHVKGKHLCPSPLFPGPSKPFWVLVVVGGVLA |
| | | CYSLLVTVAFIIFWVKRGRKKLLYIFKQPFMRPVQTTQEEDGC |
| | | SCRFPEEEEGGCELRVKFSRSADAPAYQQGQNQLYNELNLGR |
| | | REEYDVLDKRRGRDPEMGGKPRRKNPQEGLYNELQKDKMAE |
| | | AYSEIGMKGERRRGKGHDGLYQGLSTATKDTYDALHMQALP |
| | | PR |
| MC0285- | SEQ ID | ATGGCACTGCCAGTGACCGCCCTGCTGCTGCCTCTGGCCCT |
| 3PF12_8_ | NO: 11 | GCTGCTGCACGCAGCCAGACCCCAAGTGCAACTAGTCCAAT |
| PD1_HER2 | | CAGGTGGAGGCGTCGTGCAACCTGGAGGGTCCCTCCGCGTT |
| nucleotide | | AGCTGCGCCGCATCAGGCGTTACCTTGTCAGACTACGGCAT |
| Sequence | | GCATTGGGTTAGGCAAGCCCCCGGCAAGGGGCTCGAATGG |
| (VR285) | | ATGGCTTTCATTCGGAATGACGGGAGCGATAAATATTACGC |
| | | GGATTCAGTTAAAGGGCGGTTCACCATCAGCCGCGACAATA |
| | | GCAAAAAGACGGTCTCCTTACAGATGTCCAGCTTGCGGGCC |
| | | GAAGACACGGCTGTATACTATTGTGCTAAAAATGGCGAGAG |
| | | CGGCCCCCTGGATTACTGGTACTTTGACCTGTGGGGCAGAG |
| | | GCACCCTGGTCACGGTGTCCTCTGGAGGAGGAGGCTCCGGA |
| | | GGAGGAGGCTCTGGCGGCGGCGGCAGCGACATTGTAATGA |
| | | CCCAGTCACCCTCCTTCCTTAGTGCCTCAGTCGGAGACCGCG |
| | | TGACTATCACTTGTCGTGCCTCACACGGAATTAATAACTACC |
| | | TCGCTTGGTATCAGCAAAAACCAGGCAAGGCCCCGAAACTA |
| | | TTGATCTACGCCGCATCTACTCTGCAGAGCGGAGTACCGAG |
| | | CAGATTTAGTGGTTCCGGCAGCGGAACCGAGTTCACCCTAA |
| | | CCATTTCCAGTTTGCAGCCAGAGGATTTCGCGACCTATTACT |
| | | GCCAGCAATACGATTCATACCCGCCAACTTTCGGAAGAGGT |
| | | ACCAAGGTTGAAATCAAGACTACGACCCCAGCACCTAGACC |
| | | TCCCACCCCAGCTCCAACTATAGCTTCCCAGCCATTGTCTCT |
| | | CCGGCCAGAGGCGTGTCGACCAGCCGCTGGAGGGGCCGTTC |
| | | ATACAAGAGGACTCGATTTCGCTTGCGATATCTACATATGG |
| | | GCCCCTCTTGCCGGGACATGCGGTGTCCTGCTTCTAAGCTTG |
| | | GTTATTACCCTCTATTGCTGCAGCAGGGCCGCCCGCGGCAC |
| | | CATCGGCGCCAGGCGCACAGGCCAGCCTCTGAAGGAGGAC |
| | | CCTTCCGCCGTGCCAGTGTTCTCTGTGGACTACGGCGAGCTG |
| | | GATTTTCAGTGGCGGGAGAAAACCCCAGAGCCACCTGTGCC |
| | | CTGCGTGCCTGAGCAGACCGAGTATGCCACAATCGTGTTTC |
| | | CATCCGGAATGGGCACAAGCTCCCCTGCAAGGAGAGGCAG |
| | | CGCCGACGGACCACGGTCCGCCCAGCCACTGCGGCCCGAGG |
| | | ATGGCCACTGTTCTTGGCCCCTGCGGAGAAAGCGTGGATCC |
| | | GGGGAAGGCCGAGGCTCCCTTCTAACATGTGGAGATGTCGA |
| | | GGAAAACCCTGGCCCTATGGCGCTGCCAGTCACTGCATTGT |
| | | TATTGCCTCTGGCCCTGCTTCTCCATGCGGCGCGCCCAGAAG |
| | | TGCAGCTGGTCGAGAGCGGAGGCGGACTGGTTCAACCCGG |
| | | AGGCAGCTTGAGACTGTCCTGCGCGGCCAGCGGCTTCAACA |
| | | TCAAGGATACCTATATCCACTGGGTGAGGCAGGCTCCAGGA |
| | | AAGGGCCTGGAGTGGGTGGCAAGGATTTACCCTACTAATGG |
| | | ATATACACGCTACGCTGATTCCGTGAAGGGACGCTTTACAA |
| | | TCTCAGCAGATACATCCAAAAACACGGCCTATTTACAGATG |
| | | AATAGTTTGCGGGCCGAAGACACGGCTGTATACTATTGTTC |
| | | TCGGTGGGGGGGCGATGGATTTTATGCGATGGATTACTGGG |
| | | GCCAGGGCACCCTGGTAACCGTGTCAAGCGGCTCAACATCC |
| | | GGGTCCGGTAAGCCGGGCTCCGGCGAGGGGTCTACAAAGG |
| | | GAGATATACAGATGACACAGTCCCCCAGTTCCCTGTCCGCC |
| | | TCAGTGGGAGACCGAGTGACGATTACCTGTCGTGCCAGCCA |
| | | GGACGTCAATACCGCCGTCGCTTGGTATCAGCAAAAACCAG |
| | | GCAAGGCCCCGAAACTATTGATCTACAGTGCCTCTTTTCTGT |
| | | ACTCCGGGGTGCCGAGCAGATTTAGTGGCTCCAGGAGCGGA |
| | | ACCGATTTCACCCTAACCATTTCCAGTTTGCAGCCAGAGGA |
| | | TTTCGCGACCTATTACTGCCAGCAACACTACACCACACCGC |
| | | CAACTTTCGGACAAGGAACCAAGGTTGAAATCAAAATTGAA |
| | | GTTATGTATCCTCCTCCTTACCTAGACAATGAGAAGAGCAA |
| | | TGGAACCATTATCCATGTGAAAGGGAAACACCTTTGTCCAA |
| | | GTCCCCTATTTCCCGGGCCTTCGAAGCCCTTTTGGGTGCTGG |
| | | TGGTGGTTGGTGGAGTCCTGGCTTGCTATAGCTTGCTAGTAA |
| | | CAGTAGCGTTTATTATTTTCTGGGTGAAACGCGGCCGCAAG |
| | | AAACTGCTCTACATCTTTAAACAGCCGTTCATGAGGCCTGT |
| | | GCAGACAACGCAGGAAGAGGATGGCTGTAGTTGTCGGTTTC |
| | | CGGAAGAGGAAGAGGGGGGCTGCGAGTTGCGTGTCAAATT |
| | | TTCTCGGTCTGCCGACGCCCCCGCGTACCAGCAAGGGCAGA |
| | | ACCAGCTTTATAATGAGCTGAATCTTGGACGACGGGAGGAA |
| | | TATGACGTGCTTGACAAGAGGCGAGGTAGGGACCCTGAGAT |
| | | GGGGGGAAAACCTCGGAGGAAAAACCCACAGGAAGGCCTG |
| | | TATAACGAACTGCAGAAGGACAAGATGGCTGAAGCCTACTC |
| | | TGAGATTGGAATGAAAGGGGAACGCAGACGCGGCAAGGGC |
| | | CATGATGGCCTCTACCAAGGTCTAAGCACTGCCACCAAGGA |
| | | CACCTATGACGCACTCCACATGCAAGCTCTACCTCCCCGTTG |
| | | ATAAMC |
| MC0285- | SEQ ID | MALPVTALLLPLALLLHAARPQVQLVQSGGGVVQPGGSLRVS |
| 3PF12_8_ | NO: 12 | CAASGVTLSDYGMHWVRQAPGKGLEWMAFIRNDGSDKYYA |
| PD1_HER2 | | DSVKGRFTISRDNSKKTVSLQMSSLRAEDTAVYYCAKNGESGP |
| Protein | | LDYWYFDLWGRGTLVTVSSGGGGSGGGGSGGGGSDIVMTQS |
| Sequence | | PSFLSASVGDRVTITCRASHGINNYLAWYQQKPGKAPKLLIYA |
| (VR285) | | ASTLQSGVPSRFSGSGSGTEFTLTISSLQPEDFATYYCQQYDSY |
| | | PPTFGRGTKVEIKTTTPAPRPPTPAPTIASQPLSLRPEACRPAAG |
| | | GAVHTRGLDFACDIYIWAPLAGTCGVLLLSLVITLYCCSRAAR |
| | | GTIGARRTGQPLKEDPSAVPVFSVDYGELDFQWREKTPEPPVP |
| | | CVPEQTEYATIVFPSGMGTSSPARRGSADGPRSAQPLRPEDGH |
| | | CSWPLRRKRGSGEGRGSLLTCGDVEENPGPMALPVTALLLPLA |
| | | LLLHAARPEVQLVESGGGLVQPGGSLRLSCAASGFNIKDTYIH |
| | | WVRQAPGKGLEWVARIYPTNGYTRYADSVKGRFTISADTSKN |
| | | TAYLQMNSLRAEDTAVYYCSRWGGDGFYAMDYWGQGTLVT |
| | | VSSGSTSGSGKPGSGEGSTKGDIQMTQSPSSLSASVGDRVTITC |
| | | RASQDVNTAVAWYQQKPGKAPKLLIYSASFLYSGVPSRFSGSR |
| | | SGTDFTLTISSLQPEDFATYYCQQHYTTPPTFGQGTKVEIKIEV |
| | | MYPPPYLDNEKSNGTIIHVKGKHLCPSPLFPGPSKPFWVLVVV |
| | | GGVLACYSLLVTVAFIIFWVKRGRKKLLYIFKQPFMRPVQTTQ |
| | | EEDGCSCRFPEEEEGGCELRVKESRSADAPAYQQGQNQLYNEL |
| | | NLGRREEYDVLDKRRGRDPEMGGKPRRKNPQEGLYNELQKD |
| | | KMAEAYSEIGMKGERRRGKGHDGLYQGLSTATKDTYDALHM |
| | | QALPPR |
| MC0286- | SEQ ID | ATGGCACTGCCAGTGACCGCCCTGCTGCTGCCTCTGGCCCT |
| BB7.2_8_ | NO: 13 | GCTGCTGCACGCAGCCAGACCCCAGGTGCAGCTGCAGCAGT |
| PD1_EGFR | | CTGGACCTGAGCTGGTGAAGCCAGGAGCCTCCGTGAAGATG |
| nucleotide | | TCTTGCAAGGCCAGCGGCTACACCTTCACATCTTATCACATC |
| Sequence | | CAGTGGGTGAAGCAGCGGCCCGGACAGGGCCTGGAGTGGA |
| (VR286) | | TCGGATGGATCTACCCAGGCGACGGCTCCACACAGTATAAC |
| | | GAGAAGTTCAAGGGCAAGACCACACTGACCGCCGATAAGA |
| | | GCAGCAGCACCGCCTACATGCTGCTGAGCAGCCTGACCAGC |
| | | GAGGACAGCGCCATCTACTTTTGCGCCAGGGAGGGCACATA |
| | | CTATGCTATGGACTATTGGGGCCAGGGCACCAGCGTGACAG |
| | | TGTCTAGCGGAGGAGGAGGCTCCGGAGGAGGAGGCTCTGG |
| | | CGGCGGCGGCAGCGACGTGCTGATGACCCAGACACCACTG |
| | | AGCCTGCCCGTGAGCCTGGGCGATCAGGTGAGCATCTCCTG |
| | | TAGATCCTCTCAGAGCATCGTGCACTCCAACGGCAATACCT |
| | | ACCTGGAGTGGTATCTGCAGAAGCCAGGCCAGTCCCCCAAG |
| | | CTGCTGATCTATAAGGTGTCTAATCGGTTCAGCGGCGTGCCT |
| | | GACAGATTTTCTGGCAGCGGCTCCGGCACCGACTTCACCCT |
| | | GAAGATCAGCCGGGTGGAGGCAGAGGATCTGGGCGTGTAC |
| | | TATTGTTTCCAGGGCTCCCACGTGCCACGCACCTTTGGCGGC |
| | | GGTACCAAGCTGGAGATCAAGACTACGACCCCAGCACCTAG |
| | | ACCTCCCACCCCAGCTCCAACTATAGCTTCCCAGCCATTGTC |
| | | TCTCCGGCCAGAGGCGTGTCGACCAGCCGCTGGAGGGGCCG |
| | | TTCATACAAGAGGACTCGATTTCGCTTGCGATATCTACATAT |
| | | GGGCCCCTCTTGCCGGGACATGCGGTGTCCTGCTTCTAAGCT |
| | | TGGTTATTACCCTCTATTGCTGCAGCAGGGCCGCCCGCGGC |
| | | ACCATCGGCGCCAGGCGCACAGGCCAGCCTCTGAAGGAGG |
| | | ACCCTTCCGCCGTGCCAGTGTTCTCTGTGGACTACGGCGAG |
| | | CTGGATTTTCAGTGGCGGGAGAAAACCCCAGAGCCACCTGT |
| | | GCCCTGCGTGCCTGAGCAGACCGAGTATGCCACAATCGTGT |
| | | TTCCATCCGGAATGGGCACAAGCTCCCCTGCAAGGAGAGGC |
| | | AGCGCCGACGGACCACGGTCCGCCCAGCCACTGCGGCCCGA |
| | | GGATGGCCACTGTTCTTGGCCCCTGCGGAGAAAGCGTGGAT |
| | | CCGGGGAAGGCCGAGGCTCCCTTCTAACATGTGGAGATGTC |
| | | GAGGAAAACCCTGGCCCTATGGCGCTGCCAGTCACTGCATT |
| | | GTTATTGCCTCTGGCCCTGCTTCTCCATGCGGCGCGCCCACA |
| | | AGTGCAGCTGAAACAGAGCGGACCAGGACTGGTTCAACCC |
| | | AGCCAGAGCTTGAGCATCACGTGCACGGTTAGCGGCTTCAG |
| | | TCTGACCAATTATGGTGTGCACTGGGTGAGGCAGTCTCCAG |
| | | GAAAGGGCCTGGAGTGGCTTGGAGTCATTTGGAGCGGTGGG |
| | | AATACAGATTACAATACACCTTTTACGTCACGTCTCTCCATT |
| | | AACAAGGACAACTCCAAATCCCAAGTATTTTTCAAAATGAA |
| | | TAGCCTGCAGAGTAATGATACCGCCATCTATTACTGTGCAC |
| | | GAGCTTTGACATATTACGACTATGAATTTGCCTATTGGGGTC |
| | | AAGGCACGCTGGTGACCGTATCAGGCTCAACATCCGGGTCC |
| | | GGTAAGCCGGGCTCCGGCGAGGGGTCTACAAAGGGAGACA |
| | | TCCTTCTGACACAGAGCCCCGTGATCCTGTCCGTGTCCCCCG |
| | | GCGAGAGAGTATCATTTTCCTGTAGGGCTTCTCAGAGCATC |
| | | GGAACAAATATCCACTGGTATCAGCAACGGACTAACGGATC |
| | | ACCTCGCCTGCTCATAAAGTACGCCAGTGAATCTATTAGTG |
| | | GCATACCGAGCCGCTTCAGCGGGAGTGGCTCCGGCACAGAC |
| | | TTTACTCTGAGTATAAATTCCGTGGAATCTGAGGACATCGC |
| | | GGACTATTACTGCCAGCAAAACAATAACTGGCCCACCACGT |
| | | TCGGCGCGGGAACTAAACTAGAACTAAAGATTGAAGTTATG |
| | | TATCCTCCTCCTTACCTAGACAATGAGAAGAGCAATGGAAC |
| | | CATTATCCATGTGAAAGGGAAACACCTTTGTCCAAGTCCCC |
| | | TATTTCCCGGGCCTTCGAAGCCCTTTTGGGTGCTGGTGGTGG |
| | | TTGGTGGAGTCCTGGCTTGCTATAGCTTGCTAGTAACAGTA |
| | | GCGTTTATTATTTTCTGGGTGAAACGCGGCCGCAAGAAACT |
| | | GCTCTACATCTTTAAACAGCCGTTCATGAGGCCTGTGCAGA |
| | | CAACGCAGGAAGAGGATGGCTGTAGTTGTCGGTTTCCGGAA |
| | | GAGGAAGAGGGGGGCTGCGAGTTGCGTGTCAAATTTTCTCG |
| | | GTCTGCCGACGCCCCCGCGTACCAGCAAGGGCAGAACCAGC |
| | | TTTATAATGAGCTGAATCTTGGACGACGGGAGGAATATGAC |
| | | GTGCTTGACAAGAGGCGAGGTAGGGACCCTGAGATGGGGG |
| | | GAAAACCTCGGAGGAAAAACCCACAGGAAGGCCTGTATAA |
| | | CGAACTGCAGAAGGACAAGATGGCTGAAGCCTACTCTGAG |
| | | ATTGGAATGAAAGGGGAACGCAGACGCGGCAAGGGCCATG |
| | | ATGGCCTCTACCAAGGTCTAAGCACTGCCACCAAGGACACC |
| | | TATGACGCACTCCACATGCAAGCTCTACCTCCCCGTTGATA |
| | | A |
| MC0286- | SEQ ID | MALPVTALLLPLALLLHAARPQVQLQQSGPELVKPGASVKMS |
| BB7.2_8_ | NO: 14 | CKASGYTFTSYHIQWVKQRPGQGLEWIGWIYPGDGSTQYNEK |
| PD1_EGFR | | FKGKTTLTADKSSSTAYMLLSSLTSEDSAIYFCAREGTYYAMD |
| Protein | | YWGQGTSVTVSSGGGGSGGGGSGGGGSDVLMTQTPLSLPVSL |
| Sequence | | GDQVSISCRSSQSIVHSNGNTYLEWYLQKPGQSPKLLIYKVSNR |
| (VR286) | | FSGVPDRFSGSGSGTDFTLKISRVEAEDLGVYYCFQGSHVPRTF |
| | | GGGTKLEIKTTTPAPRPPTPAPTIASQPLSLRPEACRPAAGGAV |
| | | HTRGLDFACDIYIWAPLAGTCGVLLLSLVITLYCCSRAARGTIG |
| | | ARRTGQPLKEDPSAVPVFSVDYGELDFQWREKTPEPPVPCVPE |
| | | QTEYATIVFPSGMGTSSPARRGSADGPRSAQPLRPEDGHCSWP |
| | | LRRKRGSGEGRGSLLTCGDVEENPGPMALPVTALLLPLALLLH |
| | | AARPQVQLKQSGPGLVQPSQSLSITCTVSGFSLTNYGVHWVRQ |
| | | SPGKGLEWLGVIWSGGNTDYNTPFTSRLSINKDNSKSQVFFKM |
| | | NSLQSNDTAIYYCARALTYYDYEFAYWGQGTLVTVSGSTSGS |
| | | GKPGSGEGSTKGDILLTQSPVILSVSPGERVSFSCRASQSIGTNI |
| | | HWYQQRTNGSPRLLIKYASESISGIPSRFSGSGSGTDFTLSINSV |
| | | ESEDIADYYCQQNNNWPTTFGAGTKLELKIEVMYPPPYLDNE |
| | | KSNGTIIHVKGKHLCPSPLFPGPSKPFWVLVVVGGVLACYSLL |
| | | VTVAFIIFWVKRGRKKLLYIFKQPFMRPVQTTQEEDGCSCRFPE |
| | | EEEGGCELRVKFSRSADAPAYQQGQNQLYNELNLGRREEYDV |
| | | LDKRRGRDPEMGGKPRRKNPQEGLYNELQKDKMAEAYSEIG |
| | | [sequence omitted] |
| MC0287- | SEQ ID | ATGGCACTGCCAGTGACCGCCCTGCTGCTGCCTCTGGCCCT |
| 3PF12_8_P | NO: 15 | GCTGCTGCACGCAGCCAGACCCCAAGTGCAACTAGTCCAAT |
| D1_EGFR | | CAGGTGGAGGCGTCGTGCAACCTGGAGGGTCCCTCCGCGTT |
| Nucleotide | | AGCTGCGCCGCATCAGGCGTTACCTTGTCAGACTACGGCAT |
| Sequence | | GCATTGGGTTAGGCAAGCCCCCGGCAAGGGGCTCGAATGG |
| (VR287) | | ATGGCTTTCATTCGGAATGACGGGAGCGATAAATATTACGC |
| | | GGATTCAGTTAAAGGGCGGTTCACCATCAGCCGCGACAATA |
| | | GCAAAAAGACGGTCTCCTTACAGATGTCCAGCTTGCGGGCC |
| | | GAAGACACGGCTGTATACTATTGTGCTAAAAATGGCGAGAG |
| | | CGGCCCCCTGGATTACTGGTACTTTGACCTGTGGGGCAGAG |
| | | GCACCCTGGTCACGGTGTCCTCTGGAGGAGGAGGCTCCGGA |
| | | GGAGGAGGCTCTGGCGGCGGCGGCAGCGACATTGTAATGA |
| | | CCCAGTCACCCTCCTTCCTTAGTGCCTCAGTCGGAGACCGCG |
| | | TGACTATCACTTGTCGTGCCTCACACGGAATTAATAACTACC |
| | | TCGCTTGGTATCAGCAAAAACCAGGCAAGGCCCCGAAACTA |
| | | TTGATCTACGCCGCATCTACTCTGCAGAGCGGAGTACCGAG |
| | | CAGATTTAGTGGTTCCGGCAGCGGAACCGAGTTCACCCTAA |
| | | CCATTTCCAGTTTGCAGCCAGAGGATTTCGCGACCTATTACT |
| | | GCCAGCAATACGATTCATACCCGCCAACTTTCGGAAGAGGT |
| | | ACCAAGGTTGAAATCAAGACTACGACCCCAGCACCTAGACC |
| | | TCCCACCCCAGCTCCAACTATAGCTTCCCAGCCATTGTCTCT |
| | | CCGGCCAGAGGCGTGTCGACCAGCCGCTGGAGGGGCCGTTC |
| | | ATACAAGAGGACTCGATTTCGCTTGCGATATCTACATATGG |
| | | GCCCCTCTTGCCGGGACATGCGGTGTCCTGCTTCTAAGCTTG |
| | | GTTATTACCCTCTATTGCTGCAGCAGGGCCGCCCGCGGCAC |
| | | CATCGGCGCCAGGCGCACAGGCCAGCCTCTGAAGGAGGAC |
| | | CCTTCCGCCGTGCCAGTGTTCTCTGTGGACTACGGCGAGCTG |
| | | GATTTTCAGTGGCGGGAGAAAACCCCAGAGCCACCTGTGCC |
| | | CTGCGTGCCTGAGCAGACCGAGTATGCCACAATCGTGTTTC |
| | | CATCCGGAATGGGCACAAGCTCCCCTGCAAGGAGAGGCAG |
| | | CGCCGACGGACCACGGTCCGCCCAGCCACTGCGGCCCGAGG |
| | | ATGGCCACTGTTCTTGGCCCCTGCGGAGAAAGCGTGGATCC |
| | | GGGGAAGGCCGAGGCTCCCTTCTAACATGTGGAGATGTCGA |
| | | GGAAAACCCTGGCCCTATGGCGCTGCCAGTCACTGCATTGT |
| | | TATTGCCTCTGGCCCTGCTTCTCCATGCGGCGCGCCCACAAG |
| | | TGCAGCTGAAACAGAGCGGACCAGGACTGGTTCAACCCAG |
| | | CCAGAGCTTGAGCATCACGTGCACGGTTAGCGGCTTCAGTC |
| | | TGACCAATTATGGTGTGCACTGGGTGAGGCAGTCTCCAGGA |
| | | AAGGGCCTGGAGTGGCTTGGAGTCATTTGGAGCGGTGGGAA |
| | | TACAGATTACAATACACCTTTTACGTCACGTCTCTCCATTAA |
| | | CAAGGACAACTCCAAATCCCAAGTATTTTTCAAAATGAATA |
| | | GCCTGCAGAGTAATGATACCGCCATCTATTACTGTGCACGA |
| | | GCTTTGACATATTACGACTATGAATTTGCCTATTGGGGTCAA |
| | | GGCACGCTGGTGACCGTATCAGGCTCAACATCCGGGTCCGG |
| | | TAAGCCGGGCTCCGGCGAGGGGTCTACAAAGGGAGACATC |
| | | CTTCTGACACAGAGCCCCGTGATCCTGTCCGTGTCCCCCGGC |
| | | GAGAGAGTATCATTTTCCTGTAGGGCTTCTCAGAGCATCGG |
| | | AACAAATATCCACTGGTATCAGCAACGGACTAACGGATCAC |
| | | CTCGCCTGCTCATAAAGTACGCCAGTGAATCTATTAGTGGC |
| | | ATACCGAGCCGCTTCAGCGGGAGTGGCTCCGGCACAGACTT |
| | | TACTCTGAGTATAAATTCCGTGGAATCTGAGGACATCGCGG |
| | | ACTATTACTGCCAGCAAAACAATAACTGGCCCACCACGTTC |
| | | GGCGCGGGAACTAAACTAGAACTAAAGATTGAAGTTATGTA |
| | | TCCTCCTCCTTACCTAGACAATGAGAAGAGCAATGGAACCA |
| | | TTATCCATGTGAAAGGGAAACACCTTTGTCCAAGTCCCCTA |
| | | TTTCCCGGGCCTTCGAAGCCCTTTTGGGTGCTGGTGGTGGTT |
| | | GGTGGAGTCCTGGCTTGCTATAGCTTGCTAGTAACAGTAGC |
| | | GTTTATTATTTTCTGGGTGAAACGCGGCCGCAAGAAACTGC |
| | | TCTACATCTTTAAACAGCCGTTCATGAGGCCTGTGCAGACA |
| | | ACGCAGGAAGAGGATGGCTGTAGTTGTCGGTTTCCGGAAGA |
| | | GGAAGAGGGGGGCTGCGAGTTGCGTGTCAAATTTTCTCGGT |
| | | CTGCCGACGCCCCCGCGTACCAGCAAGGGCAGAACCAGCTT |
| | | TATAATGAGCTGAATCTTGGACGACGGGAGGAATATGACGT |
| | | GCTTGACAAGAGGCGAGGTAGGGACCCTGAGATGGGGGGA |
| | | AAACCTCGGAGGAAAAACCCACAGGAAGGCCTGTATAACG |
| | | AACTGCAGAAGGACAAGATGGCTGAAGCCTACTCTGAGATT |
| | | GGAATGAAAGGGGAACGCAGACGCGGCAAGGGCCATGATG |
| | | GCCTCTACCAAGGTCTAAGCACTGCCACCAAGGACACCTAT |
| | | GACGCACTCCACATGCAAGCTCTACCTCCCCGTTGATAA |
| MC0287- | SEQ ID | MALPVTALLLPLALLLHAARPQVQLVQSGGGVVQPGGSLRVS |
| 3PF12_8_ | NO: 16 | CAASGVTLSDYGMHWVRQAPGKGLEWMAFIRNDGSDKYYA |
| PD1_EGFR | | DSVKGRFTISRDNSKKTVSLQMSSLRAEDTAVYYCAKNGESGP |
| Protein | | LDYWYFDLWGRGTLVTVSSGGGGSGGGGSGGGGSDIVMTQS |
| Sequence | | PSFLSASVGDRVTITCRASHGINNYLAWYQQKPGKAPKLLIYA |
| (VR287) | | ASTLQSGVPSRFSGSGSGTEFTLTISSLQPEDFATYYCQQYDSY |
| | | PPTFGRGTKVEIKTTTPAPRPPTPAPTIASQPLSLRPEACRPAAG |
| | | GAVHTRGLDFACDIYIWAPLAGTCGVLLLSLVITLYCCSRAAR |
| | | GTIGARRTGQPLKEDPSAVPVFSVDYGELDFQWREKTPEPPVP |
| | | CVPEQTEYATIVFPSGMGTSSPARRGSADGPRSAQPLRPEDGH |
| | | CSWPLRRKRGSGEGRGSLLTCGDVEENPGPMALPVTALLLPLA |
| | | LLLHAARPQVQLKQSGPGLVQPSQSLSITCTVSGFSLTNYGVH |
| | | WVRQSPGKGLEWLGVIWSGGNTDYNTPFTSRLSINKDNSKSQ |
| | | VFFKMNSLQSNDTAIYYCARALTYYDYEFAYWGQGTLVTVSG |
| | | STSGSGKPGSGEGSTKGDILLTQSPVILSVSPGERVSFSCRASQSI |
| | | GTNIHWYQQRTNGSPRLLIKYASESISGIPSRFSGSGSGTDFTLSI |
| | | NSVESEDIADYYCQQNNNWPTTFGAGTKLELKIEVMYPPPYLD |
| | | NEKSNGTIIHVKGKHLCPSPLFPGPSKPFWVLVVVGGVLACYS |
| | | LLVTVAFIIFWVKRGRKKLLYIFKQPFMRPVQTTQEEDGCSCRF |
| | | PEEEEGGCELRVKFSRSADAPAYQQGQNQLYNELNLGRREEY |
| | | DVLDKRRGRDPEMGGKPRRKNPQEGLYNELQKDKMAEAYSE |
| | | IGMKGERRRGKGHDGLYQGLSTATKDTYDALHMQALPPR |
| MC0288- | SEQ ID | ATGGCACTGCCAGTGACCGCCCTGCTGCTGCCTCTGGCCCT |
| BB7.2_28_ | NO: 17 | GCTGCTGCACGCAGCCAGACCCCAGGTGCAGCTGCAGCAGT |
| Pdel_HER2 | | CTGGACCTGAGCTGGTGAAGCCAGGAGCCTCCGTGAAGATG |
| Nucleotide | | TCTTGCAAGGCCAGCGGCTACACCTTCACATCTTATCACATC |
| Sequence | | CAGTGGGTGAAGCAGCGGCCCGGACAGGGCCTGGAGTGGA |
| (VR288) | | TCGGATGGATCTACCCAGGCGACGGCTCCACACAGTATAAC |
| | | GAGAAGTTCAAGGGCAAGACCACACTGACCGCCGATAAGA |
| | | GCAGCAGCACCGCCTACATGCTGCTGAGCAGCCTGACCAGC |
| | | GAGGACAGCGCCATCTACTTTTGCGCCAGGGAGGGCACATA |
| | | CTATGCTATGGACTATTGGGGCCAGGGCACCAGCGTGACAG |
| | | TGTCTAGCGGAGGAGGAGGCTCCGGAGGAGGAGGCTCTGG |
| | | CGGCGGCGGCAGCGACGTGCTGATGACCCAGACACCACTG |
| | | AGCCTGCCCGTGAGCCTGGGCGATCAGGTGAGCATCTCCTG |
| | | TAGATCCTCTCAGAGCATCGTGCACTCCAACGGCAATACCT |
| | | ACCTGGAGTGGTATCTGCAGAAGCCAGGCCAGTCCCCCAAG |
| | | CTGCTGATCTATAAGGTGTCTAATCGGTTCAGCGGCGTGCCT |
| | | GACAGATTTTCTGGCAGCGGCTCCGGCACCGACTTCACCCT |
| | | GAAGATCAGCCGGGTGGAGGCAGAGGATCTGGGCGTGTAC |
| | | TATTGTTTCCAGGGCTCCCACGTGCCACGCACCTTTGGCGGC |
| | | GGTACCAAGCTGGAGATCAAGATTGAAGTTATGTATCCTCC |
| | | TCCTTACCTAGACAATGAGAAGAGCAATGGAACCATTATCC |
| | | ATGTGAAAGGGAAACACCTTTGTCCAAGTCCCCTATTTCCC |
| | | GGGCCTTCGAAGCCCTTTTGGGTGCTGGTGGTGGTTGGTGG |
| | | AGTCCTGGCTTGCTATAGCTTGCTAGTAACAGTAGCGTTTAT |
| | | TATTTTCTGGGTGCGGAGAAAGCGTGGATCCGGGGAAGGCC |
| | | GAGGCTCCCTTCTAACATGTGGAGATGTCGAGGAAAACCCT |
| | | GGCCCTATGGCGCTGCCAGTCACTGCATTGTTATTGCCTCTG |
| | | GCCCTGCTTCTCCATGCGGCGCGCCCAGAAGTGCAGCTGGT |
| | | CGAGAGCGGAGGCGGACTGGTTCAACCCGGAGGCAGCTTG |
| | | AGACTGTCCTGCGCGGCCAGCGGCTTCAACATCAAGGATAC |
| | | CTATATCCACTGGGTGAGGCAGGCTCCAGGAAAGGGCCTGG |
| | | AGTGGGTGGCAAGGATTTACCCTACTAATGGATATACACGC |
| | | TACGCTGATTCCGTGAAGGGACGCTTTACAATCTCAGCAGA |
| | | TACATCCAAAAACACGGCCTATTTACAGATGAATAGTTTGC |
| | | GGGCCGAAGACACGGCTGTATACTATTGTTCTCGGTGGGGG |
| | | GGCGATGGATTTTATGCGATGGATTACTGGGGCCAGGGCAC |
| | | CCTGGTAACCGTGTCAAGCGGCTCAACATCCGGGTCCGGTA |
| | | AGCCGGGCTCCGGCGAGGGGTCTACAAAGGGAGATATACA |
| | | GATGACACAGTCCCCCAGTTCCCTGTCCGCCTCAGTGGGAG |
| | | ACCGAGTGACGATTACCTGTCGTGCCAGCCAGGACGTCAAT |
| | | ACCGCCGTCGCTTGGTATCAGCAAAAACCAGGCAAGGCCCC |
| | | GAAACTATTGATCTACAGTGCCTCTTTTCTGTACTCCGGGGT |
| | | GCCGAGCAGATTTAGTGGCTCCAGGAGCGGAACCGATTTCA |
| | | CCCTAACCATTTCCAGTTTGCAGCCAGAGGATTTCGCGACCT |
| | | ATTACTGCCAGCAACACTACACCACACCGCCAACTTTCGGA |
| | | CAAGGAACCAAGGTTGAAATCAAAACTACGACCCCAGCAC |
| | | CTAGACCTCCCACCCCAGCTCCAACTATAGCTTCCCAGCCAT |
| | | TGTCTCTCCGGCCAGAGGCGTGTCGACCAGCCGCTGGAGGG |
| | | GCCGTTCATACAAGAGGACTCGATTTCGCTTGCGATATCTA |
| | | CATATGGGCCCCTCTTGCCGGGACATGCGGTGTCCTGCTTCT |
| | | AAGCTTGGTTATTACCCTCTATTGCAAACGCGGCCGCAAGA |
| | | AACTGCTCTACATCTTTAAACAGCCGTTCATGAGGCCTGTGC |
| | | AGACAACGCAGGAAGAGGATGGCTGTAGTTGTCGGTTTCCG |
| | | GAAGAGGAAGAGGGGGGCTGCGAGTTGCGTGTCAAATTTTC |
| | | TCGGTCTGCCGACGCCCCCGCGTACCAGCAAGGGCAGAACC |
| | | AGCTTTATAATGAGCTGAATCTTGGACGACGGGAGGAATAT |
| | | GACGTGCTTGACAAGAGGCGAGGTAGGGACCCTGAGATGG |
| | | GGGGAAAACCTCGGAGGAAAAACCCACAGGAAGGCCTGTA |
| | | TAACGAACTGCAGAAGGACAAGATGGCTGAAGCCTACTCTG |
| | | AGATTGGAATGAAAGGGGAACGCAGACGCGGCAAGGGCCA |
| | | TGATGGCCTCTACCAAGGTCTAAGCACTGCCACCAAGGACA |
| | | CCTATGACGCACTCCACATGCAAGCTCTACCTCCCCGTTGAT |
| | | AA |
| MC0288- | SEQ ID | MALPVTALLLPLALLLHAARPQVQLQQSGPELVKPGASVKMS |
| BB7.2_28_ | NO: 18 | CKASGYTFTSYHIQWVKQRPGQGLEWIGWIYPGDGSTQYNEK |
| Pdel_HER2 | | FKGKTTLTADKSSSTAYMLLSSLTSEDSAIYFCAREGTYYAMD |
| Protein | | YWGQGTSVTVSSGGGGSGGGGSGGGGSDVLMTQTPLSLPVSL |
| Sequence | | GDQVSISCRSSQSIVHSNGNTYLEWYLQKPGQSPKLLIYKVSNR |
| (VR288) | | FSGVPDRFSGSGSGTDFTLKISRVEAEDLGVYYCFQGSHVPRTF |
| | | GGGTKLEIKIEVMYPPPYLDNEKSNGTIIHVKGKHLCPSPLFPG |
| | | PSKPFWVLVVVGGVLACYSLLVTVAFIIFWVRRKRGSGEGRGS |
| | | LLTCGDVEENPGPMALPVTALLLPLALLLHAARPEVQLVESGG |
| | | GLVQPGGSLRLSCAASGFNIKDTYIHWVRQAPGKGLEWVARI |
| | | YPTNGYTRYADSVKGRFTISADTSKNTAYLQMNSLRAEDTAV |
| | | YYCSRWGGDGFYAMDYWGQGTLVTVSSGSTSGSGKPGSGEG |
| | | STKGDIQMTQSPSSLSASVGDRVTITCRASQDVNTAVAWYQQ |
| | | KPGKAPKLLIYSASFLYSGVPSRFSGSRSGTDFTLTISSLQPEDF |
| | | ATYYCQQHYTTPPTFGQGTKVEIKTTTPAPRPPTPAPTIASQPLS |
| | | LRPEACRPAAGGAVHTRGLDFACDIYIWAPLAGTCGVLLLSLV |
| | | ITLYCKRGRKKLLYIFKQPFMRPVQTTQEEDGCSCRFPEEEEGG |
| | | CELRVKFSRSADAPAYQQGQNQLYNELNLGRREEYDVLDKRR |
| | | GRDPEMGGKPRRKNPQEGLYNELQKDKMAEAYSEIGMKGER |
| | | RRGKGHDGLYQGLSTATKDTYDALHMQALPPR |
| MC0289- | SEQ ID | ATGGCACTGCCAGTGACCGCCCTGCTGCTGCCTCTGGCCCT |
| 3PF12_28 | NO: 19 | GCTGCTGCACGCAGCCAGACCCCAAGTGCAACTAGTCCAAT |
| Pdel_HER2 | | CAGGTGGAGGCGTCGTGCAACCTGGAGGGTCCCTCCGCGTT |
| Nucleotide | | AGCTGCGCCGCATCAGGCGTTACCTTGTCAGACTACGGCAT |
| Sequence | | GCATTGGGTTAGGCAAGCCCCCGGCAAGGGGCTCGAATGG |
| (VR289) | | ATGGCTTTCATTCGGAATGACGGGAGCGATAAATATTACGC |
| | | GGATTCAGTTAAAGGGCGGTTCACCATCAGCCGCGACAATA |
| | | GCAAAAAGACGGTCTCCTTACAGATGTCCAGCTTGCGGGCC |
| | | GAAGACACGGCTGTATACTATTGTGCTAAAAATGGCGAGAG |
| | | CGGCCCCCTGGATTACTGGTACTTTGACCTGTGGGGCAGAG |
| | | GCACCCTGGTCACGGTGTCCTCTGGAGGAGGAGGCTCCGGA |
| | | GGAGGAGGCTCTGGCGGCGGCGGCAGCGACATTGTAATGA |
| | | CCCAGTCACCCTCCTTCCTTAGTGCCTCAGTCGGAGACCGCG |
| | | TGACTATCACTTGTCGTGCCTCACACGGAATTAATAACTACC |
| | | TCGCTTGGTATCAGCAAAAACCAGGCAAGGCCCCGAAACTA |
| | | TTGATCTACGCCGCATCTACTCTGCAGAGCGGAGTACCGAG |
| | | CAGATTTAGTGGTTCCGGCAGCGGAACCGAGTTCACCCTAA |
| | | CCATTTCCAGTTTGCAGCCAGAGGATTTCGCGACCTATTACT |
| | | GCCAGCAATACGATTCATACCCGCCAACTTTCGGAAGAGGT |
| | | ACCAAGGTTGAAATCAAGATTGAAGTTATGTATCCTCCTCC |
| | | TTACCTAGACAATGAGAAGAGCAATGGAACCATTATCCATG |
| | | TGAAAGGGAAACACCTTTGTCCAAGTCCCCTATTTCCCGGG |
| | | CCTTCGAAGCCCTTTTGGGTGCTGGTGGTGGTTGGTGGAGTC |
| | | CTGGCTTGCTATAGCTTGCTAGTAACAGTAGCGTTTATTATT |
| | | TTCTGGGTGCGGAGAAAGCGTGGATCCGGGGAAGGCCGAG |
| | | GCTCCCTTCTAACATGTGGAGATGTCGAGGAAAACCCTGGC |
| | | CCTATGGCGCTGCCAGTCACTGCATTGTTATTGCCTCTGGCC |
| | | CTGCTTCTCCATGCGGCGCGCCCAGAAGTGCAGCTGGTCGA |
| | | GAGCGGAGGCGGACTGGTTCAACCCGGAGGCAGCTTGAGA |
| | | CTGTCCTGCGCGGCCAGCGGCTTCAACATCAAGGATACCTA |
| | | TATCCACTGGGTGAGGCAGGCTCCAGGAAAGGGCCTGGAGT |
| | | GGGTGGCAAGGATTTACCCTACTAATGGATATACACGCTAC |
| | | GCTGATTCCGTGAAGGGACGCTTTACAATCTCAGCAGATAC |
| | | ATCCAAAAACACGGCCTATTTACAGATGAATAGTTTGCGGG |
| | | CCGAAGACACGGCTGTATACTATTGTTCTCGGTGGGGGGGC |
| | | GATGGATTTTATGCGATGGATTACTGGGGCCAGGGCACCCT |
| | | GGTAACCGTGTCAAGCGGCTCAACATCCGGGTCCGGTAAGC |
| | | CGGGCTCCGGCGAGGGGTCTACAAAGGGAGATATACAGAT |
| | | GACACAGTCCCCCAGTTCCCTGTCCGCCTCAGTGGGAGACC |
| | | GAGTGACGATTACCTGTCGTGCCAGCCAGGACGTCAATACC |
| | | GCCGTCGCTTGGTATCAGCAAAAACCAGGCAAGGCCCCGAA |
| | | ACTATTGATCTACAGTGCCTCTTTTCTGTACTCCGGGGTGCC |
| | | GAGCAGATTTAGTGGCTCCAGGAGCGGAACCGATTTCACCC |
| | | TAACCATTTCCAGTTTGCAGCCAGAGGATTTCGCGACCTATT |
| | | ACTGCCAGCAACACTACACCACACCGCCAACTTTCGGACAA |
| | | GGAACCAAGGTTGAAATCAAAACTACGACCCCAGCACCTA |
| | | GACCTCCCACCCCAGCTCCAACTATAGCTTCCCAGCCATTGT |
| | | CTCTCCGGCCAGAGGCGTGTCGACCAGCCGCTGGAGGGGCC |
| | | GTTCATACAAGAGGACTCGATTTCGCTTGCGATATCTACAT |
| | | ATGGGCCCCTCTTGCCGGGACATGCGGTGTCCTGCTTCTAA |
| | | GCTTGGTTATTACCCTCTATTGCAAACGCGGCCGCAAGAAA |
| | | CTGCTCTACATCTTTAAACAGCCGTTCATGAGGCCTGTGCAG |
| | | ACAACGCAGGAAGAGGATGGCTGTAGTTGTCGGTTTCCGGA |
| | | AGAGGAAGAGGGGGGCTGCGAGTTGCGTGTCAAATTTTCTC |
| | | GGTCTGCCGACGCCCCCGCGTACCAGCAAGGGCAGAACCA |
| | | GCTTTATAATGAGCTGAATCTTGGACGACGGGAGGAATATG |
| | | ACGTGCTTGACAAGAGGCGAGGTAGGGACCCTGAGATGGG |
| | | GGGAAAACCTCGGAGGAAAAACCCACAGGAAGGCCTGTAT |
| | | AACGAACTGCAGAAGGACAAGATGGCTGAAGCCTACTCTG |
| | | AGATTGGAATGAAAGGGGAACGCAGACGCGGCAAGGGCCA |
| | | TGATGGCCTCTACCAAGGTCTAAGCACTGCCACCAAGGACA |
| | | CCTATGACGCACTCCACATGCAAGCTCTACCTCCCCGTTGAT |
| | | AA |
| MC0289- | SEQ ID | MALPVTALLLPLALLLHAARPQVQLVQSGGGVVQPGGSLRVS |
| 3PF12_28 | NO: 20 | CAASGVTLSDYGMHWVRQAPGKGLEWMAFIRNDGSDKYYA |
| Pdel_HER2 | | DSVKGRFTISRDNSKKTVSLQMSSLRAEDTAVYYCAKNGESGP |
| Protein | | LDYWYFDLWGRGTLVTVSSGGGGSGGGGSGGGGSDIVMTQS |
| Sequence | | PSFLSASVGDRVTITCRASHGINNYLAWYQQKPGKAPKLLIYA |
| (VR289) | | ASTLQSGVPSRFSGSGSGTEFTLTISSLQPEDFATYYCQQYDSY |
| | | PPTFGRGTKVEIKIEVMYPPPYLDNEKSNGTIIHVKGKHLCPSPL |
| | | FPGPSKPFWVLVVVGGVLACYSLLVTVAFIIFWVRRKRGSGEG |
| | | RGSLLTCGDVEENPGPMALPVTALLLPLALLLHAARPEVQLVE |
| | | SGGGLVQPGGSLRLSCAASGFNIKDTYIHWVRQAPGKGLEWV |
| | | ARIYPTNGYTRYADSVKGRFTISADTSKNTAYLQMNSLRAEDT |
| | | AVYYCSRWGGDGFYAMDYWGQGTLVTVSSGSTSGSGKPGSG |
| | | EGSTKGDIQMTQSPSSLSASVGDRVTITCRASQDVNTAVAWY |
| | | QQKPGKAPKLLIYSASFLYSGVPSRESGSRSGTDFTLTISSLQPE |
| | | DFATYYCQQHYTTPPTFGQGTKVEIKTTTPAPRPPTPAPTIASQ |
| | | PLSLRPEACRPAAGGAVHTRGLDFACDIYIWAPLAGTCGVLLL |
| | | SLVITLYCKRGRKKLLYIFKQPFMRPVQTTQEEDGCSCRFPEEE |
| | | EGGCELRVKFSRSADAPAYQQGQNQLYNELNLGRREEYDVLD |
| | | KRRGRDPEMGGKPRRKNPQEGLYNELQKDKMAEAYSEIGMK |
| | | GERRRGKGHDGLYQGLSTATKDTYDALHMQALPPR |
| MC0290- | SEQ ID | ATGGCACTGCCAGTGACCGCCCTGCTGCTGCCTCTGGCCCT |
| 3PF12_28 | NO: 21 | GCTGCTGCACGCAGCCAGACCCCAAGTGCAACTAGTCCAAT |
| LIR1_HER2 | | CAGGTGGAGGCGTCGTGCAACCTGGAGGGTCCCTCCGCGTT |
| Nucleic | | AGCTGCGCCGCATCAGGCGTTACCTTGTCAGACTACGGCAT |
| acid | | GCATTGGGTTAGGCAAGCCCCCGGCAAGGGGCTCGAATGG |
| sequence | | ATGGCTTTCATTCGGAATGACGGGAGCGATAAATATTACGC |
| (VR290) | | GGATTCAGTTAAAGGGCGGTTCACCATCAGCCGCGACAATA |
| | | GCAAAAAGACGGTCTCCTTACAGATGTCCAGCTTGCGGGCC |
| | | GAAGACACGGCTGTATACTATTGTGCTAAAAATGGCGAGAG |
| | | CGGCCCCCTGGATTACTGGTACTTTGACCTGTGGGGCAGAG |
| | | GCACCCTGGTCACGGTGTCCTCTGGAGGAGGAGGCTCCGGA |
| | | GGAGGAGGCTCTGGCGGCGGCGGCAGCGACATTGTAATGA |
| | | CCCAGTCACCCTCCTTCCTTAGTGCCTCAGTCGGAGACCGCG |
| | | TGACTATCACTTGTCGTGCCTCACACGGAATTAATAACTACC |
| | | TCGCTTGGTATCAGCAAAAACCAGGCAAGGCCCCGAAACTA |
| | | TTGATCTACGCCGCATCTACTCTGCAGAGCGGAGTACCGAG |
| | | CAGATTTAGTGGTTCCGGCAGCGGAACCGAGTTCACCCTAA |
| | | CCATTTCCAGTTTGCAGCCAGAGGATTTCGCGACCTATTACT |
| | | GCCAGCAATACGATTCATACCCGCCAACTTTCGGAAGAGGT |
| | | ACCAAGGTTGAAATCAAGATTGAAGTTATGTATCCTCCTCC |
| | | TTACCTAGACAATGAGAAGAGCAATGGAACCATTATCCATG |
| | | TGAAAGGGAAACACCTTTGTCCAAGTCCCCTATTTCCCGGG |
| | | CCTTCGAAGCCCTTTTGGGTGCTGGTGGTGGTTGGTGGAGTC |
| | | CTGGCTTGCTATAGCTTGCTAGTAACAGTAGCGTTTATTATT |
| | | TTCTGGGTGCTGCGCCACAGGAGACAGGGCAAGCACTGGAC |
| | | CAGCACCCAGCGGAAGGCCGACTTTCAGCACCCTGCCGGCG |
| | | CCGTGGGCCCTGAGCCTACCGACAGGGGCCTGCAGTGGAGG |
| | | AGCTCCCCAGCCGCCGATGCCCAGGAGGAGAATCTGTACGC |
| | | CGCCGTGAAGCACACCCAGCCAGAGGACGGCGTGGAGATG |
| | | GACACCCGCTCCCCACACGACGAGGATCCACAGGCCGTGAC |
| | | CTACGCCGAGGTGAAGCACAGCCGCCCCAGACGCGAGATG |
| | | GCCAGCCCACCCAGCCCCCTGTCCGGCGAGTTCCTGGACAC |
| | | CAAGGACAGGCAGGCCGAGGAGGACCGGCAGATGGACACC |
| | | GAGGCCGCCGCCTCCGAGGCCCCCCAGGACGTGACCTACGC |
| | | CCAGCTGCACTCCCTGACCCTGCGGAGAGAGGCCACCGAGC |
| | | CCCCACCCAGCCAGGAGGGCCCCTCCCCCGCCGTGCCTAGC |
| | | ATCTACGCCACCCTGGCCATCCACCGGAGAAAGCGTGGATC |
| | | CGGGGAAGGCCGAGGCTCCCTTCTAACATGTGGAGATGTCG |
| | | AGGAAAACCCTGGCCCTATGGCGCTGCCAGTCACTGCATTG |
| | | TTATTGCCTCTGGCCCTGCTTCTCCATGCGGCGCGCCCAGAA |
| | | GTGCAGCTGGTCGAGAGCGGAGGCGGACTGGTTCAACCCG |
| | | GAGGCAGCTTGAGACTGTCCTGCGCGGCCAGCGGCTTCAAC |
| | | ATCAAGGATACCTATATCCACTGGGTGAGGCAGGCTCCAGG |
| | | AAAGGGCCTGGAGTGGGTGGCAAGGATTTACCCTACTAATG |
| | | GATATACACGCTACGCTGATTCCGTGAAGGGACGCTTTACA |
| | | ATCTCAGCAGATACATCCAAAAACACGGCCTATTTACAGAT |
| | | GAATAGTTTGCGGGCCGAAGACACGGCTGTATACTATTGTT |
| | | CTCGGTGGGGGGGCGATGGATTTTATGCGATGGATTACTGG |
| | | GGCCAGGGCACCCTGGTAACCGTGTCAAGCGGCTCAACATC |
| | | CGGGTCCGGTAAGCCGGGCTCCGGCGAGGGGTCTACAAAG |
| | | GGAGATATACAGATGACACAGTCCCCCAGTTCCCTGTCCGC |
| | | CTCAGTGGGAGACCGAGTGACGATTACCTGTCGTGCCAGCC |
| | | AGGACGTCAATACCGCCGTCGCTTGGTATCAGCAAAAACCA |
| | | GGCAAGGCCCCGAAACTATTGATCTACAGTGCCTCTTTTCTG |
| | | TACTCCGGGGTGCCGAGCAGATTTAGTGGCTCCAGGAGCGG |
| | | AACCGATTTCACCCTAACCATTTCCAGTTTGCAGCCAGAGG |
| | | ATTTCGCGACCTATTACTGCCAGCAACACTACACCACACCG |
| | | CCAACTTTCGGACAAGGAACCAAGGTTGAAATCAAAACTAC |
| | | GACCCCAGCACCTAGACCTCCCACCCCAGCTCCAACTATAG |
| | | CTTCCCAGCCATTGTCTCTCCGGCCAGAGGCGTGTCGACCA |
| | | GCCGCTGGAGGGGCCGTTCATACAAGAGGACTCGATTTCGC |
| | | TTGCGATATCTACATATGGGCCCCTCTTGCCGGGACATGCG |
| | | GTGTCCTGCTTCTAAGCTTGGTTATTACCCTCTATTGCAAAC |
| | | GCGGCCGCAAGAAACTGCTCTACATCTTTAAACAGCCGTTC |
| | | ATGAGGCCTGTGCAGACAACGCAGGAAGAGGATGGCTGTA |
| | | GTTGTCGGTTTCCGGAAGAGGAAGAGGGGGGCTGCGAGTTG |
| | | CGTGTCAAATTTTCTCGGTCTGCCGACGCCCCCGCGTACCAG |
| | | CAAGGGCAGAACCAGCTTTATAATGAGCTGAATCTTGGACG |
| | | ACGGGAGGAATATGACGTGCTTGACAAGAGGCGAGGTAGG |
| | | GACCCTGAGATGGGGGGAAAACCTCGGAGGAAAAACCCAC |
| | | AGGAAGGCCTGTATAACGAACTGCAGAAGGACAAGATGGC |
| | | TGAAGCCTACTCTGAGATTGGAATGAAAGGGGAACGCAGA |
| | | CGCGGCAAGGGCCATGATGGCCTCTACCAAGGTCTAAGCAC |
| | | TGCCACCAAGGACACCTATGACGCACTCCACATGCAAGCTC |
| | | TACCTCCCCGTTGATAA |
| MC0290- | SEQ ID | MALPVTALLLPLALLLHAARPQVQLVQSGGGVVQPGGSLRVS |
| 3PF12_28 | NO: 22 | CAASGVTLSDYGMHWVRQAPGKGLEWMAFIRNDGSDKYYA |
| LIR1_HER2 | | DSVKGRFTISRDNSKKTVSLQMSSLRAEDTAVYYCAKNGESGP |
| Protein | | LDYWYFDLWGRGTLVTVSSGGGGSGGGGSGGGGSDIVMTQS |
| sequence | | PSFLSASVGDRVTITCRASHGINNYLAWYQQKPGKAPKLLIYA |
| (VR290) | | ASTLQSGVPSRESGSGSGTEFTLTISSLQPEDFATYYCQQYDSY |
| | | PPTFGRGTKVEIKIEVMYPPPYLDNEKSNGTIIHVKGKHLCPSPL |
| | | FPGPSKPFWVLVVVGGVLACYSLLVTVAFIIFWVLRHRRQGKH |
| | | WTSTQRKADFQHPAGAVGPEPTDRGLQWRSSPAADAQEENL |
| | | YAAVKHTQPEDGVEMDTRSPHDEDPQAVTYAEVKHSRPRRE |
| | | MASPPSPLSGEFLDTKDRQAEEDRQMDTEAAASEAPQDVTYA |
| | | QLHSLTLRREATEPPPSQEGPSPAVPSIYATLAIHRRKRGSGEGR |
| | | GSLLTCGDVEENPGPMALPVTALLLPLALLLHAARPEVQLVES |
| | | GGGLVQPGGSLRLSCAASGFNIKDTYIHWVRQAPGKGLEWVA |
| | | RIYPTNGYTRYADSVKGRFTISADTSKNTAYLQMNSLRAEDTA |
| | | VYYCSRWGGDGFYAMDYWGQGTLVTVSSGSTSGSGKPGSGE |
| | | GSTKGDIQMTQSPSSLSASVGDRVTITCRASQDVNTAVAWYQ |
| | | QKPGKAPKLLIYSASFLYSGVPSRFSGSRSGTDFTLTISSLQPED |
| | | FATYYCQQHYTTPPTFGQGTKVEIKTTTPAPRPPTPAPTIASQPL |
| | | SLRPEACRPAAGGAVHTRGLDFACDIYIWAPLAGTCGVLLLSL |
| | | VITLYCKRGRKKLLYIFKQPFMRPVQTTQEEDGCSCRFPEEEEG |
| | | GCELRVKFSRSADAPAYQQGQNQLYNELNLGRREEYDVLDKR |
| | | RGRDPEMGGKPRRKNPQEGLYNELQKDKMAEAYSEIGMKGE |
| | | RRRGKGHDGLYQGLSTATKDTYDALHMQALPPR |
| MC0291- | SEQ ID | ATGGCACTGCCAGTGACCGCCCTGCTGCTGCCTCTGGCCCT |
| 3PF12_28_ | NO: 23 | GCTGCTGCACGCAGCCAGACCCCAAGTGCAACTAGTCCAAT |
| KIR2DL1_ | | CAGGTGGAGGCGTCGTGCAACCTGGAGGGTCCCTCCGCGTT |
| HER2 | | AGCTGCGCCGCATCAGGCGTTACCTTGTCAGACTACGGCAT |
| nucleotide | | GCATTGGGTTAGGCAAGCCCCCGGCAAGGGGCTCGAATGG |
| Sequence | | ATGGCTTTCATTCGGAATGACGGGAGCGATAAATATTACGC |
| (VR291) | | GGATTCAGTTAAAGGGCGGTTCACCATCAGCCGCGACAATA |
| | | GCAAAAAGACGGTCTCCTTACAGATGTCCAGCTTGCGGGCC |
| | | GAAGACACGGCTGTATACTATTGTGCTAAAAATGGCGAGAG |
| | | CGGCCCCCTGGATTACTGGTACTTTGACCTGTGGGGCAGAG |
| | | GCACCCTGGTCACGGTGTCCTCTGGAGGAGGAGGCTCCGGA |
| | | GGAGGAGGCTCTGGCGGCGGCGGCAGCGACATTGTAATGA |
| | | CCCAGTCACCCTCCTTCCTTAGTGCCTCAGTCGGAGACCGCG |
| | | TGACTATCACTTGTCGTGCCTCACACGGAATTAATAACTACC |
| | | TCGCTTGGTATCAGCAAAAACCAGGCAAGGCCCCGAAACTA |
| | | TTGATCTACGCCGCATCTACTCTGCAGAGCGGAGTACCGAG |
| | | CAGATTTAGTGGTTCCGGCAGCGGAACCGAGTTCACCCTAA |
| | | CCATTTCCAGTTTGCAGCCAGAGGATTTCGCGACCTATTACT |
| | | GCCAGCAATACGATTCATACCCGCCAACTTTCGGAAGAGGT |
| | | ACCAAGGTTGAAATCAAGATTGAAGTTATGTATCCTCCTCC |
| | | TTACCTAGACAATGAGAAGAGCAATGGAACCATTATCCATG |
| | | TGAAAGGGAAACACCTTTGTCCAAGTCCCCTATTTCCCGGG |
| | | CCTTCGAAGCCCTTTTGGGTGCTGGTGGTGGTTGGTGGAGTC |
| | | CTGGCTTGCTATAGCTTGCTAGTAACAGTAGCGTTTATTATT |
| | | TTCTGGGTGCATAGGTGGTGCTCAAACAAAAAGAATGCTGC |
| | | CGTCATGGACCAGGAGAGCGCGGGCAATCGGACCGCAAAC |
| | | TCAGAGGACTCAGATGAACAAGATCCACAGGAAGTGACCT |
| | | ACACTCAGCTGAACCATTGTGTGTTTACACAGCGCAAGATT |
| | | ACTCGTCCAAGCCAGCGTCCTAAGACCCCCCCGACCGATAT |
| | | CATTGTGTATACCGAGCTTCCTAATGCCGAATCCCGCAGCA |
| | | AGGTGGTCTCCTGCCCGCGGAGAAAGCGTGGATCCGGGGA |
| | | AGGCCGAGGCTCCCTTCTAACATGTGGAGATGTCGAGGAAA |
| | | ACCCTGGCCCTATGGCGCTGCCAGTCACTGCATTGTTATTGC |
| | | CTCTGGCCCTGCTTCTCCATGCGGCGCGCCCAGAAGTGCAG |
| | | CTGGTCGAGAGCGGAGGCGGACTGGTTCAACCCGGAGGCA |
| | | GCTTGAGACTGTCCTGCGCGGCCAGCGGCTTCAACATCAAG |
| | | GATACCTATATCCACTGGGTGAGGCAGGCTCCAGGAAAGGG |
| | | CCTGGAGTGGGTGGCAAGGATTTACCCTACTAATGGATATA |
| | | CACGCTACGCTGATTCCGTGAAGGGACGCTTTACAATCTCA |
| | | GCAGATACATCCAAAAACACGGCCTATTTACAGATGAATAG |
| | | TTTGCGGGCCGAAGACACGGCTGTATACTATTGTTCTCGGT |
| | | GGGGGGGCGATGGATTTTATGCGATGGATTACTGGGGCCAG |
| | | GGCACCCTGGTAACCGTGTCAAGCGGCTCAACATCCGGGTC |
| | | CGGTAAGCCGGGCTCCGGCGAGGGGTCTACAAAGGGAGAT |
| | | ATACAGATGACACAGTCCCCCAGTTCCCTGTCCGCCTCAGT |
| | | GGGAGACCGAGTGACGATTACCTGTCGTGCCAGCCAGGACG |
| | | TCAATACCGCCGTCGCTTGGTATCAGCAAAAACCAGGCAAG |
| | | GCCCCGAAACTATTGATCTACAGTGCCTCTTTTCTGTACTCC |
| | | GGGGTGCCGAGCAGATTTAGTGGCTCCAGGAGCGGAACCG |
| | | ATTTCACCCTAACCATTTCCAGTTTGCAGCCAGAGGATTTCG |
| | | CGACCTATTACTGCCAGCAACACTACACCACACCGCCAACT |
| | | TTCGGACAAGGAACCAAGGTTGAAATCAAAACTACGACCCC |
| | | AGCACCTAGACCTCCCACCCCAGCTCCAACTATAGCTTCCC |
| | | AGCCATTGTCTCTCCGGCCAGAGGCGTGTCGACCAGCCGCT |
| | | GGAGGGGCCGTTCATACAAGAGGACTCGATTTCGCTTGCGA |
| | | TATCTACATATGGGCCCCTCTTGCCGGGACATGCGGTGTCCT |
| | | GCTTCTAAGCTTGGTTATTACCCTCTATTGCAAACGCGGCCG |
| | | CAAGAAACTGCTCTACATCTTTAAACAGCCGTTCATGAGGC |
| | | CTGTGCAGACAACGCAGGAAGAGGATGGCTGTAGTTGTCGG |
| | | TTTCCGGAAGAGGAAGAGGGGGGCTGCGAGTTGCGTGTCA |
| | | AATTTTCTCGGTCTGCCGACGCCCCCGCGTACCAGCAAGGG |
| | | CAGAACCAGCTTTATAATGAGCTGAATCTTGGACGACGGGA |
| | | GGAATATGACGTGCTTGACAAGAGGCGAGGTAGGGACCCT |
| | | GAGATGGGGGGAAAACCTCGGAGGAAAAACCCACAGGAAG |
| | | GCCTGTATAACGAACTGCAGAAGGACAAGATGGCTGAAGC |
| | | CTACTCTGAGATTGGAATGAAAGGGGAACGCAGACGCGGC |
| | | AAGGGCCATGATGGCCTCTACCAAGGTCTAAGCACTGCCAC |
| | | CAAGGACACCTATGACGCACTCCACATGCAAGCTCTACCTC |
| | | CCCGTTGATAA |
| MC0291- | SEQ ID | MALPVTALLLPLALLLHAARPQVQLVQSGGGVVQPGGSLRVS |
| 3PF12_28 | NO: 24 | CAASGVTLSDYGMHWVRQAPGKGLEWMAFIRNDGSDKYYA |
| KIR2DL1_ | | DSVKGRFTISRDNSKKTVSLQMSSLRAEDTAVYYCAKNGESGP |
| HER2 | | LDYWYFDLWGRGTLVTVSSGGGGSGGGGSGGGGSDIVMTQS |
| Protein | | PSFLSASVGDRVTITCRASHGINNYLAWYQQKPGKAPKLLIYA |
| Sequence | | ASTLQSGVPSRFSGSGSGTEFTLTISSLQPEDFATYYCQQYDSY |
| (VR291) | | PPTFGRGTKVEIKIEVMYPPPYLDNEKSNGTIIHVKGKHLCPSPL |
| | | FPGPSKPFWVLVVVGGVLACYSLLVTVAFIIFWVHRWCSNKK |
| | | NAAVMDQESAGNRTANSEDSDEQDPQEVTYTQLNHCVFTQR |
| | | KITRPSQRPKTPPTDIIVYTELPNAESRSKVVSCPRRKRGSGEGR |
| | | GSLLTCGDVEENPGPMALPVTALLLPLALLLHAARPEVQLVES |
| | | GGGLVQPGGSLRLSCAASGFNIKDTYIHWVRQAPGKGLEWVA |
| | | RIYPTNGYTRYADSVKGRFTISADTSKNTAYLQMNSLRAEDTA |
| | | VYYCSRWGGDGFYAMDYWGQGTLVTVSSGSTSGSGKPGSGE |
| | | GSTKGDIQMTQSPSSLSASVGDRVTITCRASQDVNTAVAWYQ |
| | | QKPGKAPKLLIYSASFLYSGVPSRESGSRSGTDFTLTISSLQPED |
| | | FATYYCQQHYTTPPTFGQGTKVEIKTTTPAPRPPTPAPTIASQPL |
| | | SLRPEACRPAAGGAVHTRGLDFACDIYIWAPLAGTCGVLLLSL |
| | | VITLYCKRGRKKLLYIFKQPFMRPVQTTQEEDGCSCRFPEEEEG |
| | | GCELRVKFSRSADAPAYQQGQNQLYNELNLGRREEYDVLDKR |
| | | RGRDPEMGGKPRRKNPQEGLYNELQKDKMAEAYSEIGMKGE |
| | | RRRGKGHDGLYQGLSTATKDTYDALHMQALPPR |
| MC0292- | SEQ ID | ATGGCACTGCCAGTGACCGCCCTGCTGCTGCCTCTGGCCCT |
| BB7.2_28_ | NO: 25 | GCTGCTGCACGCAGCCAGACCCCAGGTGCAGCTGCAGCAGT |
| LIR1_HER2 | | CTGGACCTGAGCTGGTGAAGCCAGGAGCCTCCGTGAAGATG |
| nucleotide | | TCTTGCAAGGCCAGCGGCTACACCTTCACATCTTATCACATC |
| Sequence | | CAGTGGGTGAAGCAGCGGCCCGGACAGGGCCTGGAGTGGA |
| (VR292) | | TCGGATGGATCTACCCAGGCGACGGCTCCACACAGTATAAC |
| | | GAGAAGTTCAAGGGCAAGACCACACTGACCGCCGATAAGA |
| | | GCAGCAGCACCGCCTACATGCTGCTGAGCAGCCTGACCAGC |
| | | GAGGACAGCGCCATCTACTTTTGCGCCAGGGAGGGCACATA |
| | | CTATGCTATGGACTATTGGGGCCAGGGCACCAGCGTGACAG |
| | | TGTCTAGCGGAGGAGGAGGCTCCGGAGGAGGAGGCTCTGG |
| | | CGGCGGCGGCAGCGACGTGCTGATGACCCAGACACCACTG |
| | | AGCCTGCCCGTGAGCCTGGGCGATCAGGTGAGCATCTCCTG |
| | | TAGATCCTCTCAGAGCATCGTGCACTCCAACGGCAATACCT |
| | | ACCTGGAGTGGTATCTGCAGAAGCCAGGCCAGTCCCCCAAG |
| | | CTGCTGATCTATAAGGTGTCTAATCGGTTCAGCGGCGTGCCT |
| | | GACAGATTTTCTGGCAGCGGCTCCGGCACCGACTTCACCCT |
| | | GAAGATCAGCCGGGTGGAGGCAGAGGATCTGGGCGTGTAC |
| | | TATTGTTTCCAGGGCTCCCACGTGCCACGCACCTTTGGCGGC |
| | | GGTACCAAGCTGGAGATCAAGATTGAAGTTATGTATCCTCC |
| | | TCCTTACCTAGACAATGAGAAGAGCAATGGAACCATTATCC |
| | | ATGTGAAAGGGAAACACCTTTGTCCAAGTCCCCTATTTCCC |
| | | GGGCCTTCGAAGCCCTTTTGGGTGCTGGTGGTGGTTGGTGG |
| | | AGTCCTGGCTTGCTATAGCTTGCTAGTAACAGTAGCGTTTAT |
| | | TATTTTCTGGGTGCTGCGCCACAGGAGACAGGGCAAGCACT |
| | | GGACCAGCACCCAGCGGAAGGCCGACTTTCAGCACCCTGCC |
| | | GGCGCCGTGGGCCCTGAGCCTACCGACAGGGGCCTGCAGTG |
| | | GAGGAGCTCCCCAGCCGCCGATGCCCAGGAGGAGAATCTGT |
| | | ACGCCGCCGTGAAGCACACCCAGCCAGAGGACGGCGTGGA |
| | | GATGGACACCCGCTCCCCACACGACGAGGATCCACAGGCCG |
| | | TGACCTACGCCGAGGTGAAGCACAGCCGCCCCAGACGCGA |
| | | GATGGCCAGCCCACCCAGCCCCCTGTCCGGCGAGTTCCTGG |
| | | ACACCAAGGACAGGCAGGCCGAGGAGGACCGGCAGATGGA |
| | | CACCGAGGCCGCCGCCTCCGAGGCCCCCCAGGACGTGACCT |
| | | ACGCCCAGCTGCACTCCCTGACCCTGCGGAGAGAGGCCACC |
| | | GAGCCCCCACCCAGCCAGGAGGGCCCCTCCCCCGCCGTGCC |
| | | TAGCATCTACGCCACCCTGGCCATCCACCGGAGAAAGCGTG |
| | | GATCCGGGGAAGGCCGAGGCTCCCTTCTAACATGTGGAGAT |
| | | GTCGAGGAAAACCCTGGCCCTATGGCGCTGCCAGTCACTGC |
| | | ATTGTTATTGCCTCTGGCCCTGCTTCTCCATGCGGCGCGCCC |
| | | AGAAGTGCAGCTGGTCGAGAGCGGAGGCGGACTGGTTCAA |
| | | CCCGGAGGCAGCTTGAGACTGTCCTGCGCGGCCAGCGGCTT |
| | | CAACATCAAGGATACCTATATCCACTGGGTGAGGCAGGCTC |
| | | CAGGAAAGGGCCTGGAGTGGGTGGCAAGGATTTACCCTACT |
| | | AATGGATATACACGCTACGCTGATTCCGTGAAGGGACGCTT |
| | | TACAATCTCAGCAGATACATCCAAAAACACGGCCTATTTAC |
| | | AGATGAATAGTTTGCGGGCCGAAGACACGGCTGTATACTAT |
| | | TGTTCTCGGTGGGGGGGCGATGGATTTTATGCGATGGATTA |
| | | CTGGGGCCAGGGCACCCTGGTAACCGTGTCAAGCGGCTCAA |
| | | CATCCGGGTCCGGTAAGCCGGGCTCCGGCGAGGGGTCTACA |
| | | AAGGGAGATATACAGATGACACAGTCCCCCAGTTCCCTGTC |
| | | CGCCTCAGTGGGAGACCGAGTGACGATTACCTGTCGTGCCA |
| | | GCCAGGACGTCAATACCGCCGTCGCTTGGTATCAGCAAAAA |
| | | CCAGGCAAGGCCCCGAAACTATTGATCTACAGTGCCTCTTT |
| | | TCTGTACTCCGGGGTGCCGAGCAGATTTAGTGGCTCCAGGA |
| | | GCGGAACCGATTTCACCCTAACCATTTCCAGTTTGCAGCCA |
| | | GAGGATTTCGCGACCTATTACTGCCAGCAACACTACACCAC |
| | | ACCGCCAACTTTCGGACAAGGAACCAAGGTTGAAATCAAA |
| | | ACTACGACCCCAGCACCTAGACCTCCCACCCCAGCTCCAAC |
| | | TATAGCTTCCCAGCCATTGTCTCTCCGGCCAGAGGCGTGTCG |
| | | ACCAGCCGCTGGAGGGGCCGTTCATACAAGAGGACTCGATT |
| | | TCGCTTGCGATATCTACATATGGGCCCCTCTTGCCGGGACAT |
| | | GCGGTGTCCTGCTTCTAAGCTTGGTTATTACCCTCTATTGCA |
| | | AACGCGGCCGCAAGAAACTGCTCTACATCTTTAAACAGCCG |
| | | TTCATGAGGCCTGTGCAGACAACGCAGGAAGAGGATGGCT |
| | | GTAGTTGTCGGTTTCCGGAAGAGGAAGAGGGGGGCTGCGA |
| | | GTTGCGTGTCAAATTTTCTCGGTCTGCCGACGCCCCCGCGTA |
| | | CCAGCAAGGGCAGAACCAGCTTTATAATGAGCTGAATCTTG |
| | | GACGACGGGAGGAATATGACGTGCTTGACAAGAGGCGAGG |
| | | TAGGGACCCTGAGATGGGGGGAAAACCTCGGAGGAAAAAC |
| | | CCACAGGAAGGCCTGTATAACGAACTGCAGAAGGACAAGA |
| | | TGGCTGAAGCCTACTCTGAGATTGGAATGAAAGGGGAACGC |
| | | AGACGCGGCAAGGGCCATGATGGCCTCTACCAAGGTCTAAG |
| | | CACTGCCACCAAGGACACCTATGACGCACTCCACATGCAAG |
| | | CTCTACCTCCCCGTTGATAA |
| MC0292- | SEQ ID | MALPVTALLLPLALLLHAARPQVQLQQSGPELVKPGASVKMS |
| BB7.2_28_ | NO: 26 | CKASGYTFTSYHIQWVKQRPGQGLEWIGWIYPGDGSTQYNEK |
| LIR1_HER2 | | FKGKTTLTADKSSSTAYMLLSSLTSEDSAIYFCAREGTYYAMD |
| Protein | | YWGQGTSVTVSSGGGGSGGGGSGGGGSDVLMTQTPLSLPVSL |
| Sequence | | GDQVSISCRSSQSIVHSNGNTYLEWYLQKPGQSPKLLIYKVSNR |
| (VR292) | | FSGVPDRFSGSGSGTDFTLKISRVEAEDLGVYYCFQGSHVPRTF |
| | | GGGTKLEIKIEVMYPPPYLDNEKSNGTIIHVKGKHLCPSPLFPG |
| | | PSKPFWVLVVVGGVLACYSLLVTVAFIIFWVLRHRRQGKHWT |
| | | STQRKADFQHPAGAVGPEPTDRGLQWRSSPAADAQEENLYAA |
| | | VKHTQPEDGVEMDTRSPHDEDPQAVTYAEVKHSRPRREMASP |
| | | PSPLSGEFLDTKDRQAEEDRQMDTEAAASEAPQDVTYAQLHS |
| | | LTLRREATEPPPSQEGPSPAVPSIYATLAIHRRKRGSGEGRGSLL |
| | | TCGDVEENPGPMALPVTALLLPLALLLHAARPEVQLVESGGGL |
| | | VQPGGSLRLSCAASGFNIKDTYIHWVRQAPGKGLEWVARIYPT |
| | | NGYTRYADSVKGRFTISADTSKNTAYLQMNSLRAEDTAVYYC |
| | | SRWGGDGFYAMDYWGQGTLVTVSSGSTSGSGKPGSGEGSTK |
| | | GDIQMTQSPSSLSASVGDRVTITCRASQDVNTAVAWYQQKPG |
| | | KAPKLLIYSASFLYSGVPSRFSGSRSGTDFTLTISSLQPEDFATY |
| | | YCQQHYTTPPTFGQGTKVEIKTTTPAPRPPTPAPTIASQPLSLRP |
| | | EACRPAAGGAVHTRGLDFACDIYIWAPLAGTCGVLLLSLVITL |
| | | YCKRGRKKLLYIFKQPFMRPVQTTQEEDGCSCRFPEEEEGGCE |
| | | LRVKFSRSADAPAYQQGQNQLYNELNLGRREEYDVLDKRRG |
| | | RDPEMGGKPRRKNPQEGLYNELQKDKMAEAYSEIGMKGERR |
| | | RGKGHDGLYQGLSTATKDTYDALHMQALPPR |
| MC0293- | SEQ ID | ATGGCACTGCCAGTGACCGCCCTGCTGCTGCCTCTGGCCCT |
| BB7.2_28_ | NO: 27 | GCTGCTGCACGCAGCCAGACCCCAGGTGCAGCTGCAGCAGT |
| KIR2DL1 | | CTGGACCTGAGCTGGTGAAGCCAGGAGCCTCCGTGAAGATG |
| HER2 | | TCTTGCAAGGCCAGCGGCTACACCTTCACATCTTATCACATC |
| nucleotide | | CAGTGGGTGAAGCAGCGGCCCGGACAGGGCCTGGAGTGGA |
| sequence | | TCGGATGGATCTACCCAGGCGACGGCTCCACACAGTATAAC |
| (VR293) | | GAGAAGTTCAAGGGCAAGACCACACTGACCGCCGATAAGA |
| | | GCAGCAGCACCGCCTACATGCTGCTGAGCAGCCTGACCAGC |
| | | GAGGACAGCGCCATCTACTTTTGCGCCAGGGAGGGCACATA |
| | | CTATGCTATGGACTATTGGGGCCAGGGCACCAGCGTGACAG |
| | | TGTCTAGCGGAGGAGGAGGCTCCGGAGGAGGAGGCTCTGG |
| | | CGGCGGCGGCAGCGACGTGCTGATGACCCAGACACCACTG |
| | | AGCCTGCCCGTGAGCCTGGGCGATCAGGTGAGCATCTCCTG |
| | | TAGATCCTCTCAGAGCATCGTGCACTCCAACGGCAATACCT |
| | | ACCTGGAGTGGTATCTGCAGAAGCCAGGCCAGTCCCCCAAG |
| | | CTGCTGATCTATAAGGTGTCTAATCGGTTCAGCGGCGTGCCT |
| | | GACAGATTTTCTGGCAGCGGCTCCGGCACCGACTTCACCCT |
| | | GAAGATCAGCCGGGTGGAGGCAGAGGATCTGGGCGTGTAC |
| | | TATTGTTTCCAGGGCTCCCACGTGCCACGCACCTTTGGCGGC |
| | | GGTACCAAGCTGGAGATCAAGATTGAAGTTATGTATCCTCC |
| | | TCCTTACCTAGACAATGAGAAGAGCAATGGAACCATTATCC |
| | | ATGTGAAAGGGAAACACCTTTGTCCAAGTCCCCTATTTCCC |
| | | GGGCCTTCGAAGCCCTTTTGGGTGCTGGTGGTGGTTGGTGG |
| | | AGTCCTGGCTTGCTATAGCTTGCTAGTAACAGTAGCGTTTAT |
| | | TATTTTCTGGGTGCATAGGTGGTGCTCAAACAAAAAGAATG |
| | | CTGCCGTCATGGACCAGGAGAGCGCGGGCAATCGGACCGC |
| | | AAACTCAGAGGACTCAGATGAACAAGATCCACAGGAAGTG |
| | | ACCTACACTCAGCTGAACCATTGTGTGTTTACACAGCGCAA |
| | | GATTACTCGTCCAAGCCAGCGTCCTAAGACCCCCCCGACCG |
| | | ATATCATTGTGTATACCGAGCTTCCTAATGCCGAATCCCGCA |
| | | GCAAGGTGGTCTCCTGCCCGCGGAGAAAGCGTGGATCCGGG |
| | | GAAGGCCGAGGCTCCCTTCTAACATGTGGAGATGTCGAGGA |
| | | AAACCCTGGCCCTATGGCGCTGCCAGTCACTGCATTGTTATT |
| | | GCCTCTGGCCCTGCTTCTCCATGCGGCGCGCCCAGAAGTGC |
| | | AGCTGGTCGAGAGCGGAGGCGGACTGGTTCAACCCGGAGG |
| | | CAGCTTGAGACTGTCCTGCGCGGCCAGCGGCTTCAACATCA |
| | | AGGATACCTATATCCACTGGGTGAGGCAGGCTCCAGGAAAG |
| | | GGCCTGGAGTGGGTGGCAAGGATTTACCCTACTAATGGATA |
| | | TACACGCTACGCTGATTCCGTGAAGGGACGCTTTACAATCT |
| | | CAGCAGATACATCCAAAAACACGGCCTATTTACAGATGAAT |
| | | AGTTTGCGGGCCGAAGACACGGCTGTATACTATTGTTCTCG |
| | | GTGGGGGGGCGATGGATTTTATGCGATGGATTACTGGGGCC |
| | | AGGGCACCCTGGTAACCGTGTCAAGCGGCTCAACATCCGGG |
| | | TCCGGTAAGCCGGGCTCCGGCGAGGGGTCTACAAAGGGAG |
| | | ATATACAGATGACACAGTCCCCCAGTTCCCTGTCCGCCTCA |
| | | GTGGGAGACCGAGTGACGATTACCTGTCGTGCCAGCCAGGA |
| | | CGTCAATACCGCCGTCGCTTGGTATCAGCAAAAACCAGGCA |
| | | AGGCCCCGAAACTATTGATCTACAGTGCCTCTTTTCTGTACT |
| | | CCGGGGTGCCGAGCAGATTTAGTGGCTCCAGGAGCGGAACC |
| | | GATTTCACCCTAACCATTTCCAGTTTGCAGCCAGAGGATTTC |
| | | GCGACCTATTACTGCCAGCAACACTACACCACACCGCCAAC |
| | | TTTCGGACAAGGAACCAAGGTTGAAATCAAAACTACGACCC |
| | | CAGCACCTAGACCTCCCACCCCAGCTCCAACTATAGCTTCC |
| | | CAGCCATTGTCTCTCCGGCCAGAGGCGTGTCGACCAGCCGC |
| | | TGGAGGGGCCGTTCATACAAGAGGACTCGATTTCGCTTGCG |
| | | ATATCTACATATGGGCCCCTCTTGCCGGGACATGCGGTGTC |
| | | CTGCTTCTAAGCTTGGTTATTACCCTCTATTGCAAACGCGGC |
| | | CGCAAGAAACTGCTCTACATCTTTAAACAGCCGTTCATGAG |
| | | GCCTGTGCAGACAACGCAGGAAGAGGATGGCTGTAGTTGTC |
| | | GGTTTCCGGAAGAGGAAGAGGGGGGCTGCGAGTTGCGTGT |
| | | CAAATTTTCTCGGTCTGCCGACGCCCCCGCGTACCAGCAAG |
| | | GGCAGAACCAGCTTTATAATGAGCTGAATCTTGGACGACGG |
| | | GAGGAATATGACGTGCTTGACAAGAGGCGAGGTAGGGACC |
| | | CTGAGATGGGGGGAAAACCTCGGAGGAAAAACCCACAGGA |
| | | AGGCCTGTATAACGAACTGCAGAAGGACAAGATGGCTGAA |
| | | GCCTACTCTGAGATTGGAATGAAAGGGGAACGCAGACGCG |
| | | GCAAGGGCCATGATGGCCTCTACCAAGGTCTAAGCACTGCC |
| | | ACCAAGGACACCTATGACGCACTCCACATGCAAGCTCTACC |
| | | TCCCCGTTGATAA |
| MC0293- | SEQ ID | MALPVTALLLPLALLLHAARPQVQLQQSGPELVKPGASVKMS |
| BB7.2_28_ | NO: 28 | CKASGYTFTSYHIQWVKQRPGQGLEWIGWIYPGDGSTQYNEK |
| KIR2DL1_ | | FKGKTTLTADKSSSTAYMLLSSLTSEDSAIYFCAREGTYYAMD |
| HER2 | | YWGQGTSVTVSSGGGGSGGGGSGGGGSDVLMTQTPLSLPVSL |
| Protein | | GDQVSISCRSSQSIVHSNGNTYLEWYLQKPGQSPKLLIYKVSNR |
| Sequence | | FSGVPDRFSGSGSGTDFTLKISRVEAEDLGVYYCFQGSHVPRTF |
| (VR293) | | GGGTKLEIKIEVMYPPPYLDNEKSNGTIIHVKGKHLCPSPLFPG |
| | | PSKPFWVLVVVGGVLACYSLLVTVAFIIFWVHRWCSNKKNAA |
| | | VMDQESAGNRTANSEDSDEQDPQEVTYTQLNHCVFTQRKITR |
| | | PSQRPKTPPTDIIVYTELPNAESRSKVVSCPRRKRGSGEGRGSLL |
| | | TCGDVEENPGPMALPVTALLLPLALLLHAARPEVQLVESGGGL |
| | | VQPGGSLRLSCAASGFNIKDTYIHWVRQAPGKGLEWVARIYPT |
| | | NGYTRYADSVKGRFTISADTSKNTAYLQMNSLRAEDTAVYYC |
| | | SRWGGDGFYAMDYWGQGTLVTVSSGSTSGSGKPGSGEGSTK |
| | | GDIQMTQSPSSLSASVGDRVTITCRASQDVNTAVAWYQQKPG |
| | | KAPKLLIYSASFLYSGVPSRESGSRSGTDFTLTISSLQPEDFATY |
| | | YCQQHYTTPPTFGQGTKVEIKTTTPAPRPPTPAPTIASQPLSLRP |
| | | EACRPAAGGAVHTRGLDFACDIYIWAPLAGTCGVLLLSLVITL |
| | | YCKRGRKKLLYIFKQPFMRPVQTTQEEDGCSCRFPEEEEGGCE |
| | | LRVKFSRSADAPAYQQGQNQLYNELNLGRREEYDVLDKRRG |
| | | RDPEMGGKPRRKNPQEGLYNELQKDKMAEAYSEIGMKGERR |
| | | RGKGHDGLYQGLSTATKDTYDALHMQALPPR |
| MC0294- | SEQ ID | ATGGCACTGCCAGTGACCGCCCTGCTGCTGCCTCTGGCCCT |
| 3PF12_CD8_ | NO: 29 | GCTGCTGCACGCAGCCAGACCCCAAGTGCAACTAGTCCAAT |
| LIR1_HER2 | | CAGGTGGAGGCGTCGTGCAACCTGGAGGGTCCCTCCGCGTT |
| Nucleotide | | AGCTGCGCCGCATCAGGCGTTACCTTGTCAGACTACGGCAT |
| sequence | | GCATTGGGTTAGGCAAGCCCCCGGCAAGGGGCTCGAATGG |
| (VR294) | | ATGGCTTTCATTCGGAATGACGGGAGCGATAAATATTACGC |
| | | GGATTCAGTTAAAGGGCGGTTCACCATCAGCCGCGACAATA |
| | | GCAAAAAGACGGTCTCCTTACAGATGTCCAGCTTGCGGGCC |
| | | GAAGACACGGCTGTATACTATTGTGCTAAAAATGGCGAGAG |
| | | CGGCCCCCTGGATTACTGGTACTTTGACCTGTGGGGCAGAG |
| | | GCACCCTGGTCACGGTGTCCTCTGGAGGAGGAGGCTCCGGA |
| | | GGAGGAGGCTCTGGCGGCGGCGGCAGCGACATTGTAATGA |
| | | CCCAGTCACCCTCCTTCCTTAGTGCCTCAGTCGGAGACCGCG |
| | | TGACTATCACTTGTCGTGCCTCACACGGAATTAATAACTACC |
| | | TCGCTTGGTATCAGCAAAAACCAGGCAAGGCCCCGAAACTA |
| | | TTGATCTACGCCGCATCTACTCTGCAGAGCGGAGTACCGAG |
| | | CAGATTTAGTGGTTCCGGCAGCGGAACCGAGTTCACCCTAA |
| | | CCATTTCCAGTTTGCAGCCAGAGGATTTCGCGACCTATTACT |
| | | GCCAGCAATACGATTCATACCCGCCAACTTTCGGAAGAGGT |
| | | ACCAAGGTTGAAATCAAGACTACGACCCCAGCACCTAGACC |
| | | TCCCACCCCAGCTCCAACTATAGCTTCCCAGCCATTGTCTCT |
| | | CCGGCCAGAGGCGTGTCGACCAGCCGCTGGAGGGGCCGTTC |
| | | ATACAAGAGGACTCGATTTCGCTTGCGATATCTACATATGG |
| | | GCCCCTCTTGCCGGGACATGCGGTGTCCTGCTTCTAAGCTTG |
| | | GTTATTACCCTCTATTGCCTGCGCCACAGGAGACAGGGCAA |
| | | GCACTGGACCAGCACCCAGCGGAAGGCCGACTTTCAGCACC |
| | | CTGCCGGCGCCGTGGGCCCTGAGCCTACCGACAGGGGCCTG |
| | | CAGTGGAGGAGCTCCCCAGCCGCCGATGCCCAGGAGGAGA |
| | | ATCTGTACGCCGCCGTGAAGCACACCCAGCCAGAGGACGGC |
| | | GTGGAGATGGACACCCGCTCCCCACACGACGAGGATCCACA |
| | | GGCCGTGACCTACGCCGAGGTGAAGCACAGCCGCCCCAGA |
| | | CGCGAGATGGCCAGCCCACCCAGCCCCCTGTCCGGCGAGTT |
| | | CCTGGACACCAAGGACAGGCAGGCCGAGGAGGACCGGCAG |
| | | ATGGACACCGAGGCCGCCGCCTCCGAGGCCCCCCAGGACGT |
| | | GACCTACGCCCAGCTGCACTCCCTGACCCTGCGGAGAGAGG |
| | | CCACCGAGCCCCCACCCAGCCAGGAGGGCCCCTCCCCCGCC |
| | | GTGCCTAGCATCTACGCCACCCTGGCCATCCACCGGAGAAA |
| | | GCGTGGATCCGGGGAAGGCCGAGGCTCCCTTCTAACATGTG |
| | | GAGATGTCGAGGAAAACCCTGGCCCTATGGCGCTGCCAGTC |
| | | ACTGCATTGTTATTGCCTCTGGCCCTGCTTCTCCATGCGGCG |
| | | CGCCCAGAAGTGCAGCTGGTCGAGAGCGGAGGCGGACTGG |
| | | TTCAACCCGGAGGCAGCTTGAGACTGTCCTGCGCGGCCAGC |
| | | GGCTTCAACATCAAGGATACCTATATCCACTGGGTGAGGCA |
| | | GGCTCCAGGAAAGGGCCTGGAGTGGGTGGCAAGGATTTAC |
| | | CCTACTAATGGATATACACGCTACGCTGATTCCGTGAAGGG |
| | | ACGCTTTACAATCTCAGCAGATACATCCAAAAACACGGCCT |
| | | ATTTACAGATGAATAGTTTGCGGGCCGAAGACACGGCTGTA |
| | | TACTATTGTTCTCGGTGGGGGGGCGATGGATTTTATGCGAT |
| | | GGATTACTGGGGCCAGGGCACCCTGGTAACCGTGTCAAGCG |
| | | GCTCAACATCCGGGTCCGGTAAGCCGGGCTCCGGCGAGGGG |
| | | TCTACAAAGGGAGATATACAGATGACACAGTCCCCCAGTTC |
| | | CCTGTCCGCCTCAGTGGGAGACCGAGTGACGATTACCTGTC |
| | | GTGCCAGCCAGGACGTCAATACCGCCGTCGCTTGGTATCAG |
| | | CAAAAACCAGGCAAGGCCCCGAAACTATTGATCTACAGTGC |
| | | CTCTTTTCTGTACTCCGGGGTGCCGAGCAGATTTAGTGGCTC |
| | | CAGGAGCGGAACCGATTTCACCCTAACCATTTCCAGTTTGC |
| | | AGCCAGAGGATTTCGCGACCTATTACTGCCAGCAACACTAC |
| | | ACCACACCGCCAACTTTCGGACAAGGAACCAAGGTTGAAAT |
| | | CAAAATTGAAGTTATGTATCCTCCTCCTTACCTAGACAATGA |
| | | GAAGAGCAATGGAACCATTATCCATGTGAAAGGGAAACAC |
| | | CTTTGTCCAAGTCCCCTATTTCCCGGGCCTTCGAAGCCCTTT |
| | | TGGGTGCTGGTGGTGGTTGGTGGAGTCCTGGCTTGCTATAG |
| | | CTTGCTAGTAACAGTAGCGTTTATTATTTTCTGGGTGAAACG |
| | | CGGCCGCAAGAAACTGCTCTACATCTTTAAACAGCCGTTCA |
| | | TGAGGCCTGTGCAGACAACGCAGGAAGAGGATGGCTGTAG |
| | | TTGTCGGTTTCCGGAAGAGGAAGAGGGGGGCTGCGAGTTGC |
| | | GTGTCAAATTTTCTCGGTCTGCCGACGCCCCCGCGTACCAGC |
| | | AAGGGCAGAACCAGCTTTATAATGAGCTGAATCTTGGACGA |
| | | CGGGAGGAATATGACGTGCTTGACAAGAGGCGAGGTAGGG |
| | | ACCCTGAGATGGGGGGAAAACCTCGGAGGAAAAACCCACA |
| | | GGAAGGCCTGTATAACGAACTGCAGAAGGACAAGATGGCT |
| | | GAAGCCTACTCTGAGATTGGAATGAAAGGGGAACGCAGAC |
| | | GCGGCAAGGGCCATGATGGCCTCTACCAAGGTCTAAGCACT |
| | | GCCACCAAGGACACCTATGACGCACTCCACATGCAAGCTCT |
| | | ACCTCCCCGTTGATAA |
| MC0294- | SEQ ID | MALPVTALLLPLALLLHAARPQVQLVQSGGGVVQPGGSLRVS |
| 3PF12_CD8_ | NO: 30 | CAASGVTLSDYGMHWVRQAPGKGLEWMAFIRNDGSDKYYA |
| LIR1_HER2 | | DSVKGRFTISRDNSKKTVSLQMSSLRAEDTAVYYCAKNGESGP |
| Protein | | LDYWYFDLWGRGTLVTVSSGGGGSGGGGSGGGGSDIVMTQS |
| Sequence | | PSFLSASVGDRVTITCRASHGINNYLAWYQQKPGKAPKLLIYA |
| (VR294) | | ASTLQSGVPSRFSGSGSGTEFTLTISSLQPEDFATYYCQQYDSY |
| | | PPTFGRGTKVEIKTTTPAPRPPTPAPTIASQPLSLRPEACRPAAG |
| | | GAVHTRGLDFACDIYIWAPLAGTCGVLLLSLVITLYCLRHRRQ |
| | | GKHWTSTQRKADFQHPAGAVGPEPTDRGLQWRSSPAADAQE |
| | | ENLYAAVKHTQPEDGVEMDTRSPHDEDPQAVTYAEVKHSRPR |
| | | REMASPPSPLSGEFLDTKDRQAEEDRQMDTEAAASEAPQDVT |
| | | YAQLHSLTLRREATEPPPSQEGPSPAVPSIYATLAIHRRKRGSG |
| | | EGRGSLLTCGDVEENPGPMALPVTALLLPLALLLHAARPEVQL |
| | | VESGGGLVQPGGSLRLSCAASGFNIKDTYIHWVRQAPGKGLE |
| | | WVARIYPTNGYTRYADSVKGRFTISADTSKNTAYLQMNSLRA |
| | | EDTAVYYCSRWGGDGFYAMDYWGQGTLVTVSSGSTSGSGKP |
| | | GSGEGSTKGDIQMTQSPSSLSASVGDRVTITCRASQDVNTAVA |
| | | WYQQKPGKAPKLLIYSASFLYSGVPSRFSGSRSGTDFTLTISSL |
| | | QPEDFATYYCQQHYTTPPTFGQGTKVEIKIEVMYPPPYLDNEK |
| | | SNGTIIHVKGKHLCPSPLFPGPSKPFWVLVVVGGVLACYSLLV |
| | | TVAFIIFWVKRGRKKLLYIFKQPFMRPVQTTQEEDGCSCRFPEE |
| | | EEGGCELRVKFSRSADAPAYQQGQNQLYNELNLGRREEYDVL |
| | | DKRRGRDPEMGGKPRRKNPQEGLYNELQKDKMAEAYSEIGM |
| | | KGERRRGKGHDGLYQGLSTATKDTYDALHMQALPPR |
| MC0295- | SEQ ID | ATGGCACTGCCAGTGACCGCCCTGCTGCTGCCTCTGGCCCT |
| 3PF12_CD8_ | NO: 31 | GCTGCTGCACGCAGCCAGACCCCAAGTGCAACTAGTCCAAT |
| KIR2DL1_ | | CAGGTGGAGGCGTCGTGCAACCTGGAGGGTCCCTCCGCGTT |
| HER2 | | AGCTGCGCCGCATCAGGCGTTACCTTGTCAGACTACGGCAT |
| nucleotide | | GCATTGGGTTAGGCAAGCCCCCGGCAAGGGGCTCGAATGG |
| Sequence | | ATGGCTTTCATTCGGAATGACGGGAGCGATAAATATTACGC |
| (VR295) | | GGATTCAGTTAAAGGGCGGTTCACCATCAGCCGCGACAATA |
| | | GCAAAAAGACGGTCTCCTTACAGATGTCCAGCTTGCGGGCC |
| | | GAAGACACGGCTGTATACTATTGTGCTAAAAATGGCGAGAG |
| | | CGGCCCCCTGGATTACTGGTACTTTGACCTGTGGGGCAGAG |
| | | GCACCCTGGTCACGGTGTCCTCTGGAGGAGGAGGCTCCGGA |
| | | GGAGGAGGCTCTGGCGGCGGCGGCAGCGACATTGTAATGA |
| | | CCCAGTCACCCTCCTTCCTTAGTGCCTCAGTCGGAGACCGCG |
| | | TGACTATCACTTGTCGTGCCTCACACGGAATTAATAACTACC |
| | | TCGCTTGGTATCAGCAAAAACCAGGCAAGGCCCCGAAACTA |
| | | TTGATCTACGCCGCATCTACTCTGCAGAGCGGAGTACCGAG |
| | | CAGATTTAGTGGTTCCGGCAGCGGAACCGAGTTCACCCTAA |
| | | CCATTTCCAGTTTGCAGCCAGAGGATTTCGCGACCTATTACT |
| | | GCCAGCAATACGATTCATACCCGCCAACTTTCGGAAGAGGT |
| | | ACCAAGGTTGAAATCAAGACTACGACCCCAGCACCTAGACC |
| | | TCCCACCCCAGCTCCAACTATAGCTTCCCAGCCATTGTCTCT |
| | | CCGGCCAGAGGCGTGTCGACCAGCCGCTGGAGGGGCCGTTC |
| | | ATACAAGAGGACTCGATTTCGCTTGCGATATCTACATATGG |
| | | GCCCCTCTTGCCGGGACATGCGGTGTCCTGCTTCTAAGCTTG |
| | | GTTATTACCCTCTATTGCCATAGGTGGTGCTCAAACAAAAA |
| | | GAATGCTGCCGTCATGGACCAGGAGAGCGCGGGCAATCGG |
| | | ACCGCAAACTCAGAGGACTCAGATGAACAAGATCCACAGG |
| | | AAGTGACCTACACTCAGCTGAACCATTGTGTGTTTACACAG |
| | | CGCAAGATTACTCGTCCAAGCCAGCGTCCTAAGACCCCCCC |
| | | GACCGATATCATTGTGTATACCGAGCTTCCTAATGCCGAAT |
| | | CCCGCAGCAAGGTGGTCTCCTGCCCGCGGAGAAAGCGTGGA |
| | | TCCGGGGAAGGCCGAGGCTCCCTTCTAACATGTGGAGATGT |
| | | CGAGGAAAACCCTGGCCCTATGGCGCTGCCAGTCACTGCAT |
| | | TGTTATTGCCTCTGGCCCTGCTTCTCCATGCGGCGCGCCCAG |
| | | AAGTGCAGCTGGTCGAGAGCGGAGGCGGACTGGTTCAACC |
| | | CGGAGGCAGCTTGAGACTGTCCTGCGCGGCCAGCGGCTTCA |
| | | ACATCAAGGATACCTATATCCACTGGGTGAGGCAGGCTCCA |
| | | GGAAAGGGCCTGGAGTGGGTGGCAAGGATTTACCCTACTAA |
| | | TGGATATACACGCTACGCTGATTCCGTGAAGGGACGCTTTA |
| | | CAATCTCAGCAGATACATCCAAAAACACGGCCTATTTACAG |
| | | ATGAATAGTTTGCGGGCCGAAGACACGGCTGTATACTATTG |
| | | TTCTCGGTGGGGGGGCGATGGATTTTATGCGATGGATTACT |
| | | GGGGCCAGGGCACCCTGGTAACCGTGTCAAGCGGCTCAACA |
| | | TCCGGGTCCGGTAAGCCGGGCTCCGGCGAGGGGTCTACAAA |
| | | GGGAGATATACAGATGACACAGTCCCCCAGTTCCCTGTCCG |
| | | CCTCAGTGGGAGACCGAGTGACGATTACCTGTCGTGCCAGC |
| | | CAGGACGTCAATACCGCCGTCGCTTGGTATCAGCAAAAACC |
| | | AGGCAAGGCCCCGAAACTATTGATCTACAGTGCCTCTTTTCT |
| | | GTACTCCGGGGTGCCGAGCAGATTTAGTGGCTCCAGGAGCG |
| | | GAACCGATTTCACCCTAACCATTTCCAGTTTGCAGCCAGAG |
| | | GATTTCGCGACCTATTACTGCCAGCAACACTACACCACACC |
| | | GCCAACTTTCGGACAAGGAACCAAGGTTGAAATCAAAATTG |
| | | AAGTTATGTATCCTCCTCCTTACCTAGACAATGAGAAGAGC |
| | | AATGGAACCATTATCCATGTGAAAGGGAAACACCTTTGTCC |
| | | AAGTCCCCTATTTCCCGGGCCTTCGAAGCCCTTTTGGGTGCT |
| | | GGTGGTGGTTGGTGGAGTCCTGGCTTGCTATAGCTTGCTAGT |
| | | AACAGTAGCGTTTATTATTTTCTGGGTGAAACGCGGCCGCA |
| | | AGAAACTGCTCTACATCTTTAAACAGCCGTTCATGAGGCCT |
| | | GTGCAGACAACGCAGGAAGAGGATGGCTGTAGTTGTCGGTT |
| | | TCCGGAAGAGGAAGAGGGGGGCTGCGAGTTGCGTGTCAAA |
| | | TTTTCTCGGTCTGCCGACGCCCCCGCGTACCAGCAAGGGCA |
| | | GAACCAGCTTTATAATGAGCTGAATCTTGGACGACGGGAGG |
| | | AATATGACGTGCTTGACAAGAGGCGAGGTAGGGACCCTGA |
| | | GATGGGGGGAAAACCTCGGAGGAAAAACCCACAGGAAGGC |
| | | CTGTATAACGAACTGCAGAAGGACAAGATGGCTGAAGCCT |
| | | ACTCTGAGATTGGAATGAAAGGGGAACGCAGACGCGGCAA |
| | | GGGCCATGATGGCCTCTACCAAGGTCTAAGCACTGCCACCA |
| | | AGGACACCTATGACGCACTCCACATGCAAGCTCTACCTCCC |
| | | CGTTGATAA |
| MC0295- | SEQ ID | MALPVTALLLPLALLLHAARPQVQLVQSGGGVVQPGGSLRVS |
| 3PF12_CD8 | NO: 32 | CAASGVTLSDYGMHWVRQAPGKGLEWMAFIRNDGSDKYYA |
| KIR2DL1_ | | DSVKGRFTISRDNSKKTVSLQMSSLRAEDTAVYYCAKNGESGP |
| HER2 | | LDYWYFDLWGRGTLVTVSSGGGGSGGGGSGGGGSDIVMTQS |
| Protein | | PSFLSASVGDRVTITCRASHGINNYLAWYQQKPGKAPKLLIYA |
| Sequence | | ASTLQSGVPSRFSGSGSGTEFTLTISSLQPEDFATYYCQQYDSY |
| (VR295) | | PPTFGRGTKVEIKTTTPAPRPPTPAPTIASQPLSLRPEACRPAAG |
| | | GAVHTRGLDFACDIYIWAPLAGTCGVLLLSLVITLYCHRWCSN |
| | | KKNAAVMDQESAGNRTANSEDSDEQDPQEVTYTQLNHCVFT |
| | | QRKITRPSQRPKTPPTDIIVYTELPNAESRSKVVSCPRRKRGSGE |
| | | GRGSLLTCGDVEENPGPMALPVTALLLPLALLLHAARPEVQLV |
| | | ESGGGLVQPGGSLRLSCAASGFNIKDTYIHWVRQAPGKGLEW |
| | | VARIYPTNGYTRYADSVKGRFTISADTSKNTAYLQMNSLRAED |
| | | TAVYYCSRWGGDGFYAMDYWGQGTLVTVSSGSTSGSGKPGS |
| | | GEGSTKGDIQMTQSPSSLSASVGDRVTITCRASQDVNTAVAW |
| | | YQQKPGKAPKLLIYSASFLYSGVPSRFSGSRSGTDFTLTISSLQP |
| | | EDFATYYCQQHYTTPPTFGQGTKVEIKIEVMYPPPYLDNEKSN |
| | | GTIIHVKGKHLCPSPLFPGPSKPFWVLVVVGGVLACYSLLVTV |
| | | AFIIFWVKRGRKKLLYIFKQPFMRPVQTTQEEDGCSCRFPEEEE |
| | | GGCELRVKFSRSADAPAYQQGQNQLYNELNLGRREEYDVLD |
| | | KRRGRDPEMGGKPRRKNPQEGLYNELQKDKMAEAYSEIGMK |
| | | GERRRGKGHDGLYQGLSTATKDTYDALHMQALPPR |
| | | ATGGCACTGCCAGTGACCGCCCTGCTGCTGCCTCTGGCCCT |
| | | GCTGCTGCACGCAGCCAGACCCCAGGTGCAGCTGCAGCAGT |
| | | CTGGACCTGAGCTGGTGAAGCCAGGAGCCTCCGTGAAGATG |
| | | TCTTGCAAGGCCAGCGGCTACACCTTCACATCTTATCACATC |
| | | CAGTGGGTGAAGCAGCGGCCCGGACAGGGCCTGGAGTGGA |
| | | TCGGATGGATCTACCCAGGCGACGGCTCCACACAGTATAAC |
| | | GAGAAGTTCAAGGGCAAGACCACACTGACCGCCGATAAGA |
| | | GCAGCAGCACCGCCTACATGCTGCTGAGCAGCCTGACCAGC |
| | | GAGGACAGCGCCATCTACTTTTGCGCCAGGGAGGGCACATA |
| | | CTATGCTATGGACTATTGGGGCCAGGGCACCAGCGTGACAG |
| MC00296- | SEQ ID | TGTCTAGCGGAGGAGGAGGCTCCGGAGGAGGAGGCTCTGG |
| BB7.2_CD8_ | NO: 33 | CGGCGGCGGCAGCGACGTGCTGATGACCCAGACACCACTG |
| LIR1_HER2 | | AGCCTGCCCGTGAGCCTGGGCGATCAGGTGAGCATCTCCTG |
| (VR296) | | TAGATCCTCTCAGAGCATCGTGCACTCCAACGGCAATACCT |
| | | ACCTGGAGTGGTATCTGCAGAAGCCAGGCCAGTCCCCCAAG |
| | | CTGCTGATCTATAAGGTGTCTAATCGGTTCAGCGGCGTGCCT |
| | | GACAGATTTTCTGGCAGCGGCTCCGGCACCGACTTCACCCT |
| | | GAAGATCAGCCGGGTGGAGGCAGAGGATCTGGGCGTGTAC |
| | | TATTGTTTCCAGGGCTCCCACGTGCCACGCACCTTTGGCGGC |
| | | GGTACCAAGCTGGAGATCAAGACTACGACCCCAGCACCTAG |
| | | ACCTCCCACCCCAGCTCCAACTATAGCTTCCCAGCCATTGTC |
| | | TCTCCGGCCAGAGGCGTGTCGACCAGCCGCTGGAGGGGCCG |
| | | TTCATACAAGAGGACTCGATTTCGCTTGCGATATCTACATAT |
| | | GGGCCCCTCTTGCCGGGACATGCGGTGTCCTGCTTCTAAGCT |
| | | TGGTTATTACCCTCTATTGCCTGCGCCACAGGAGACAGGGC |
| | | AAGCACTGGACCAGCACCCAGCGGAAGGCCGACTTTCAGC |
| | | ACCCTGCCGGCGCCGTGGGCCCTGAGCCTACCGACAGGGGC |
| | | CTGCAGTGGAGGAGCTCCCCAGCCGCCGATGCCCAGGAGG |
| | | AGAATCTGTACGCCGCCGTGAAGCACACCCAGCCAGAGGA |
| | | CGGCGTGGAGATGGACACCCGCTCCCCACACGACGAGGATC |
| | | CACAGGCCGTGACCTACGCCGAGGTGAAGCACAGCCGCCCC |
| | | AGACGCGAGATGGCCAGCCCACCCAGCCCCCTGTCCGGCGA |
| | | GTTCCTGGACACCAAGGACAGGCAGGCCGAGGAGGACCGG |
| | | CAGATGGACACCGAGGCCGCCGCCTCCGAGGCCCCCCAGG |
| | | ACGTGACCTACGCCCAGCTGCACTCCCTGACCCTGCGGAGA |
| | | GAGGCCACCGAGCCCCCACCCAGCCAGGAGGGCCCCTCCCC |
| | | CGCCGTGCCTAGCATCTACGCCACCCTGGCCATCCACCGGA |
| | | GAAAGCGTGGATCCGGGGAAGGCCGAGGCTCCCTTCTAACA |
| | | TGTGGAGATGTCGAGGAAAACCCTGGCCCTATGGCGCTGCC |
| | | AGTCACTGCATTGTTATTGCCTCTGGCCCTGCTTCTCCATGC |
| | | GGCGCGCCCAGAAGTGCAGCTGGTCGAGAGCGGAGGCGGA |
| | | CTGGTTCAACCCGGAGGCAGCTTGAGACTGTCCTGCGCGGC |
| | | CAGCGGCTTCAACATCAAGGATACCTATATCCACTGGGTGA |
| | | GGCAGGCTCCAGGAAAGGGCCTGGAGTGGGTGGCAAGGAT |
| | | TTACCCTACTAATGGATATACACGCTACGCTGATTCCGTGA |
| | | AGGGACGCTTTACAATCTCAGCAGATACATCCAAAAACACG |
| | | GCCTATTTACAGATGAATAGTTTGCGGGCCGAAGACACGGC |
| | | TGTATACTATTGTTCTCGGTGGGGGGGCGATGGATTTTATGC |
| | | GATGGATTACTGGGGCCAGGGCACCCTGGTAACCGTGTCAA |
| | | GCGGCTCAACATCCGGGTCCGGTAAGCCGGGCTCCGGCGAG |
| | | GGGTCTACAAAGGGAGATATACAGATGACACAGTCCCCCA |
| | | GTTCCCTGTCCGCCTCAGTGGGAGACCGAGTGACGATTACC |
| | | TGTCGTGCCAGCCAGGACGTCAATACCGCCGTCGCTTGGTA |
| | | TCAGCAAAAACCAGGCAAGGCCCCGAAACTATTGATCTACA |
| | | GTGCCTCTTTTCTGTACTCCGGGGTGCCGAGCAGATTTAGTG |
| | | GCTCCAGGAGCGGAACCGATTTCACCCTAACCATTTCCAGT |
| | | TTGCAGCCAGAGGATTTCGCGACCTATTACTGCCAGCAACA |
| | | CTACACCACACCGCCAACTTTCGGACAAGGAACCAAGGTTG |
| | | AAATCAAAATTGAAGTTATGTATCCTCCTCCTTACCTAGACA |
| | | ATGAGAAGAGCAATGGAACCATTATCCATGTGAAAGGGAA |
| | | ACACCTTTGTCCAAGTCCCCTATTTCCCGGGCCTTCGAAGCC |
| | | CTTTTGGGTGCTGGTGGTGGTTGGTGGAGTCCTGGCTTGCTA |
| | | TAGCTTGCTAGTAACAGTAGCGTTTATTATTTTCTGGGTGAA |
| | | ACGCGGCCGCAAGAAACTGCTCTACATCTTTAAACAGCCGT |
| | | TCATGAGGCCTGTGCAGACAACGCAGGAAGAGGATGGCTG |
| | | TAGTTGTCGGTTTCCGGAAGAGGAAGAGGGGGGCTGCGAGT |
| | | TGCGTGTCAAATTTTCTCGGTCTGCCGACGCCCCCGCGTACC |
| | | AGCAAGGGCAGAACCAGCTTTATAATGAGCTGAATCTTGGA |
| | | CGACGGGAGGAATATGACGTGCTTGACAAGAGGCGAGGTA |
| | | GGGACCCTGAGATGGGGGGAAAACCTCGGAGGAAAAACCC |
| | | ACAGGAAGGCCTGTATAACGAACTGCAGAAGGACAAGATG |
| | | GCTGAAGCCTACTCTGAGATTGGAATGAAAGGGGAACGCA |
| | | GACGCGGCAAGGGCCATGATGGCCTCTACCAAGGTCTAAGC |
| | | ACTGCCACCAAGGACACCTATGACGCACTCCACATGCAAGC |
| | | TCTACCTCCCCGTTGATAA |
| MC00296- | SEQ ID | MALPVTALLLPLALLLHAARPQVQLQQSGPELVKPGASVKMS |
| BB7.2_CD8_ | NO: 34 | CKASGYTFTSYHIQWVKQRPGQGLEWIGWIYPGDGSTQYNEK |
| LIR1_HER2 | | FKGKTTLTADKSSSTAYMLLSSLTSEDSAIYFCAREGTYYAMD |
| protein | | YWGQGTSVTVSSGGGGSGGGGSGGGGSDVLMTQTPLSLPVSL |
| Sequence | | GDQVSISCRSSQSIVHSNGNTYLEWYLQKPGQSPKLLIYKVSNR |
| (VR296) | | FSGVPDRFSGSGSGTDFTLKISRVEAEDLGVYYCFQGSHVPRTF |
| | | GGGTKLEIKTTTPAPRPPTPAPTIASQPLSLRPEACRPAAGGAV |
| | | HTRGLDFACDIYIWAPLAGTCGVLLLSLVITLYCLRHRRQGKH |
| | | WTSTQRKADFQHPAGAVGPEPTDRGLQWRSSPAADAQEENL |
| | | YAAVKHTQPEDGVEMDTRSPHDEDPQAVTYAEVKHSRPRRE |
| | | MASPPSPLSGEFLDTKDRQAEEDRQMDTEAAASEAPQDVTYA |
| | | QLHSLTLRREATEPPPSQEGPSPAVPSIYATLAIHRRKRGSGEGR |
| | | GSLLTCGDVEENPGPMALPVTALLLPLALLLHAARPEVQLVES |
| | | GGGLVQPGGSLRLSCAASGFNIKDTYIHWVRQAPGKGLEWVA |
| | | RIYPTNGYTRYADSVKGRFTISADTSKNTAYLQMNSLRAEDTA |
| | | VYYCSRWGGDGFYAMDYWGQGTLVTVSSGSTSGSGKPGSGE |
| | | GSTKGDIQMTQSPSSLSASVGDRVTITCRASQDVNTAVAWYQ |
| | | QKPGKAPKLLIYSASFLYSGVPSRFSGSRSGTDFTLTISSLQPED |
| | | FATYYCQQHYTTPPTFGQGTKVEIKIEVMYPPPYLDNEKSNGTI |
| | | IHVKGKHLCPSPLFPGPSKPFWVLVVVGGVLACYSLLVTVAFII |
| | | FWVKRGRKKLLYIFKQPFMRPVQTTQEEDGCSCRFPEEEEGGC |
| | | ELRVKFSRSADAPAYQQGQNQLYNELNLGRREEYDVLDKRRG |
| | | RDPEMGGKPRRKNPQEGLYNELQKDKMAEAYSEIGMKGERR |
| | | RGKGHDGLYQGLSTATKDTYDALHMQALPPR |
| MC00297- | SEQ ID | ATGGCACTGCCAGTGACCGCCCTGCTGCTGCCTCTGGCCCT |
| BB7.2_CD8_ | NO: 35 | GCTGCTGCACGCAGCCAGACCCCAGGTGCAGCTGCAGCAGT |
| KIR2DL1_ | | CTGGACCTGAGCTGGTGAAGCCAGGAGCCTCCGTGAAGATG |
| HER2- | | TCTTGCAAGGCCAGCGGCTACACCTTCACATCTTATCACATC |
| nucleic acid | | CAGTGGGTGAAGCAGCGGCCCGGACAGGGCCTGGAGTGGA |
| (VR297) | | TCGGATGGATCTACCCAGGCGACGGCTCCACACAGTATAAC |
| | | GAGAAGTTCAAGGGCAAGACCACACTGACCGCCGATAAGA |
| | | GCAGCAGCACCGCCTACATGCTGCTGAGCAGCCTGACCAGC |
| | | GAGGACAGCGCCATCTACTTTTGCGCCAGGGAGGGCACATA |
| | | CTATGCTATGGACTATTGGGGCCAGGGCACCAGCGTGACAG |
| | | TGTCTAGCGGAGGAGGAGGCTCCGGAGGAGGAGGCTCTGG |
| | | CGGCGGCGGCAGCGACGTGCTGATGACCCAGACACCACTG |
| | | AGCCTGCCCGTGAGCCTGGGCGATCAGGTGAGCATCTCCTG |
| | | TAGATCCTCTCAGAGCATCGTGCACTCCAACGGCAATACCT |
| | | ACCTGGAGTGGTATCTGCAGAAGCCAGGCCAGTCCCCCAAG |
| | | CTGCTGATCTATAAGGTGTCTAATCGGTTCAGCGGCGTGCCT |
| | | GACAGATTTTCTGGCAGCGGCTCCGGCACCGACTTCACCCT |
| | | GAAGATCAGCCGGGTGGAGGCAGAGGATCTGGGCGTGTAC |
| | | TATTGTTTCCAGGGCTCCCACGTGCCACGCACCTTTGGCGGC |
| | | GGTACCAAGCTGGAGATCAAGACTACGACCCCAGCACCTAG |
| | | ACCTCCCACCCCAGCTCCAACTATAGCTTCCCAGCCATTGTC |
| | | TCTCCGGCCAGAGGCGTGTCGACCAGCCGCTGGAGGGGCCG |
| | | TTCATACAAGAGGACTCGATTTCGCTTGCGATATCTACATAT |
| | | GGGCCCCTCTTGCCGGGACATGCGGTGTCCTGCTTCTAAGCT |
| | | TGGTTATTACCCTCTATTGCCATAGGTGGTGCTCAAACAAA |
| | | AAGAATGCTGCCGTCATGGACCAGGAGAGCGCGGGCAATC |
| | | GGACCGCAAACTCAGAGGACTCAGATGAACAAGATCCACA |
| | | GGAAGTGACCTACACTCAGCTGAACCATTGTGTGTTTACAC |
| | | AGCGCAAGATTACTCGTCCAAGCCAGCGTCCTAAGACCCCC |
| | | CCGACCGATATCATTGTGTATACCGAGCTTCCTAATGCCGA |
| | | ATCCCGCAGCAAGGTGGTCTCCTGCCCGCGGAGAAAGCGTG |
| | | GATCCGGGGAAGGCCGAGGCTCCCTTCTAACATGTGGAGAT |
| | | GTCGAGGAAAACCCTGGCCCTATGGCGCTGCCAGTCACTGC |
| | | ATTGTTATTGCCTCTGGCCCTGCTTCTCCATGCGGCGCGCCC |
| | | AGAAGTGCAGCTGGTCGAGAGCGGAGGCGGACTGGTTCAA |
| | | CCCGGAGGCAGCTTGAGACTGTCCTGCGCGGCCAGCGGCTT |
| | | CAACATCAAGGATACCTATATCCACTGGGTGAGGCAGGCTC |
| | | CAGGAAAGGGCCTGGAGTGGGTGGCAAGGATTTACCCTACT |
| | | AATGGATATACACGCTACGCTGATTCCGTGAAGGGACGCTT |
| | | TACAATCTCAGCAGATACATCCAAAAACACGGCCTATTTAC |
| | | AGATGAATAGTTTGCGGGCCGAAGACACGGCTGTATACTAT |
| | | TGTTCTCGGTGGGGGGGCGATGGATTTTATGCGATGGATTA |
| | | CTGGGGCCAGGGCACCCTGGTAACCGTGTCAAGCGGCTCAA |
| | | CATCCGGGTCCGGTAAGCCGGGCTCCGGCGAGGGGTCTACA |
| | | AAGGGAGATATACAGATGACACAGTCCCCCAGTTCCCTGTC |
| | | CGCCTCAGTGGGAGACCGAGTGACGATTACCTGTCGTGCCA |
| | | GCCAGGACGTCAATACCGCCGTCGCTTGGTATCAGCAAAAA |
| | | CCAGGCAAGGCCCCGAAACTATTGATCTACAGTGCCTCTTT |
| | | TCTGTACTCCGGGGTGCCGAGCAGATTTAGTGGCTCCAGGA |
| | | GCGGAACCGATTTCACCCTAACCATTTCCAGTTTGCAGCCA |
| | | GAGGATTTCGCGACCTATTACTGCCAGCAACACTACACCAC |
| | | ACCGCCAACTTTCGGACAAGGAACCAAGGTTGAAATCAAA |
| | | ATTGAAGTTATGTATCCTCCTCCTTACCTAGACAATGAGAA |
| | | GAGCAATGGAACCATTATCCATGTGAAAGGGAAACACCTTT |
| | | GTCCAAGTCCCCTATTTCCCGGGCCTTCGAAGCCCTTTTGGG |
| | | TGCTGGTGGTGGTTGGTGGAGTCCTGGCTTGCTATAGCTTGC |
| | | TAGTAACAGTAGCGTTTATTATTTTCTGGGTGAAACGCGGC |
| | | CGCAAGAAACTGCTCTACATCTTTAAACAGCCGTTCATGAG |
| | | GCCTGTGCAGACAACGCAGGAAGAGGATGGCTGTAGTTGTC |
| | | GGTTTCCGGAAGAGGAAGAGGGGGGCTGCGAGTTGCGTGT |
| | | CAAATTTTCTCGGTCTGCCGACGCCCCCGCGTACCAGCAAG |
| | | GGCAGAACCAGCTTTATAATGAGCTGAATCTTGGACGACGG |
| | | GAGGAATATGACGTGCTTGACAAGAGGCGAGGTAGGGACC |
| | | CTGAGATGGGGGGAAAACCTCGGAGGAAAAACCCACAGGA |
| | | AGGCCTGTATAACGAACTGCAGAAGGACAAGATGGCTGAA |
| | | GCCTACTCTGAGATTGGAATGAAAGGGGAACGCAGACGCG |
| | | GCAAGGGCCATGATGGCCTCTACCAAGGTCTAAGCACTGCC |
| | | ACCAAGGACACCTATGACGCACTCCACATGCAAGCTCTACC |
| | | TCCCCGTTGATAA |
| MC00297: | SEQ ID | MALPVTALLLPLALLLHAARPQVQLQQSGPELVKPGASVKMS |
| BB7.2_CD8_ | NO: 36 | CKASGYTFTSYHIQWVKQRPGQGLEWIGWIYPGDGSTQYNEK |
| KIR2DL1_ | | FKGKTTLTADKSSSTAYMLLSSLTSEDSAIYFCAREGTYYAMD |
| HER2 | | YWGQGTSVTVSSGGGGSGGGGSGGGGSDVLMTQTPLSLPVSL |
| protein | | GDQVSISCRSSQSIVHSNGNTYLEWYLQKPGQSPKLLIYKVSNR |
| Sequence | | FSGVPDRFSGSGSGTDFTLKISRVEAEDLGVYYCFQGSHVPRTF |
| (VR297) | | GGGTKLEIKTTTPAPRPPTPAPTIASQPLSLRPEACRPAAGGAV |
| | | HTRGLDFACDIYIWAPLAGTCGVLLLSLVITLYCHRWCSNKKN |
| | | AAVMDQESAGNRTANSEDSDEQDPQEVTYTQLNHCVFTQRKI |
| | | TRPSQRPKTPPTDIIVYTELPNAESRSKVVSCPRRKRGSGEGRG |
| | | SLLTCGDVEENPGPMALPVTALLLPLALLLHAARPEVQLVESG |
| | | GGLLVQPGGSLRLSCAASGFNIKDTYIHWVRQAPGKGLEWVA |
| | | RIYPTNGYTRYADSVKGRFTISADTSKNTAYLQMNSLRAEDTA |
| | | VYYCSRWGGDGFYAMDYWGQGTLVTVSSGSTSGSGKPGSGE |
| | | GSTKGDIQMTQSPSSLSASVGDRVTITCRASQDVNTAVAWYQ |
| | | QKPGKAPKLLIYSASFLYSGVPSRFSGSRSGTDFTLTISSLQPED |
| | | FATYYCQQHYTTPPTFGQGTKVEIKIEVMYPPPYLDNEKSNGTI |
| | | IHVKGKHLCPSPLFPGPSKPFWVLVVVGGVLACYSLLVTVAFII |
| | | FWVKRGRKKLLYIFKQPFMRPVQTTQEEDGCSCRFPEEEEGGC |
| | | ELRVKFSRSADAPAYQQGQNQLYNELNLGRREEYDVLDKRRG |
| | | RDPEMGGKPRRKNPQEGLYNELQKDKMAEAYSEIGMKGERR |
| | | RGKGHDGLYQGLSTATKDTYDALHMQALPPR |
| MC0421 | SEQ ID | ATGGCGCTGCCAGTCACTGCATTGTTATTGCCTCTGGCCCTG |
| HzBB7.2.2 | NO: 275 | CTTCTCCATGCGGCAAGGCCACAGGTGCAACTGGTTCAATC |
| LIR1(52)_ | | TGGTGCTGAGGTGAAAAAGCCCGGCGCATCCGTGAAAGTG |
| 2A_HER2 | | AGCTGTAAGGCATCAGGGTACACCTTCACCAGCTATCACAT |
| nucleotide | | ACAATGGGTCCGCCAGGCCCCCGGACAGAGGTTGGAATGG |
| sequence | | ATTGGGTGGATTTACCCGGGTGACGGCTCAACCCAGTACAA |
| (VR421) | | TGAGAAGTTCAAGGGCAGGGTGACTATCACACGCGATACCT |
| | | CCGCGAGCACAGCTTACATGGAGTTATCTAGCCTGAGATCC |
| | | GAAGATACGGCGGTGTATTACTGCGCGCGGGAAGGGACCT |
| | | ACTATGCCATGGACTATTGGGGACAAGGGACCCTGGTTACC |
| | | GTGAGTTCTGGGGGCGGGGGTTCCGGGGGAGGGGGATCTG |
| | | GGGGTGGAGGGAGCGATGTGGTAATGACCCAGACACCTTTG |
| | | TCTTTGAGTGTCACCCCCGGACAGCCGGCAAGTATATCCTG |
| | | TAGATCATCCCAATCAATCGTGCACTCCAACGGAAACACAT |
| | | ACTTGGAATGGTATCTCCAGAAACCTGGACAGTCCCCACAG |
| | | TTGCTCATCTACAAAGTGTCAAATCGCTTTTCAGGCGTGCCC |
| | | GATCGTTTCAGCGGCTCAGGCTCCGGGACAGACTTTACATT |
| | | GAAGATTAGCCGCGTAGAGGCAGAGGATGTGGGCGTTTACT |
| | | ATTGTTTTCAAGGGTCACACGTGCCACGCACATTCGGCGGC |
| | | GGTACCAAGGTGGAAATTAAGCACCCCAGCGACCCGCTGG |
| | | AGCTCGTTGTGTCCGGACCATCAGGGGGCCCGAGTAGCCCT |
| | | ACAACCGGCCCCACTTCTACCAGTGGACCGGAAGATCAACC |
| | | ACTTACACCAACGGGCAGCGACCCCCAGTCAGGCCTAGGGC |
| | | GCCACCTGGGTGTGGTCATCGGGATACTGGTCGCTGTCATC |
| | | CTGCTTCTGCTCCTTCTCTTGCTCCTATTCCTAATCCTGCGCC |
| | | ACAGGAGACAGGGCAAGCACTGGACCAGCACCCAGCGGAA |
| | | GGCCGACTTTCAGCACCCTGCCGGCGCCGTGGGCCCTGAGC |
| | | CTACCGACAGGGGCCTGCAGTGGAGGAGCTCCCCAGCCGCC |
| | | GATGCCCAGGAGGAGAATCTGTACGCCGCCGTGAAGCACA |
| | | CCCAGCCAGAGGACGGCGTGGAGATGGACACCCGCTCCCC |
| | | ACACGACGAGGACCCACAGGCCGTGACCTACGCCGAGGTG |
| | | AAGCACAGCCGCCCCAGACGCGAGATGGCCAGCCCACCCA |
| | | GCCCCCTGTCCGGCGAGTTCCTGGACACCAAGGACAGGCAG |
| | | GCCGAGGAGGACCGGCAGATGGACACCGAGGCCGCCGCCT |
| | | CCGAGGCCCCCCAGGACGTGACCTACGCCCAGCTGCACTCC |
| | | CTGACCCTGCGGAGAGAGGCCACCGAGCCCCCACCCAGCCA |
| | | GGAGGGCCCCTCCCCCGCCGTGCCTAGCATCTACGCCACCC |
| | | TGGCCATCCACCGGAGAAAGCGTGGATCCGGGGAAGGCCG |
| | | AGGCTCCCTTCTAACATGTGGAGATGTCGAGGAAAACCCTG |
| | | GCCCTATGGCGCTGCCAGTCACTGCATTGTTATTGCCTCTGG |
| | | CCCTGCTTCTCCATGCGGCGCGCCCAGACATCCAGATGACC |
| | | CAATCCCCAAGCAGTCTCTCAGCCAGCGTGGGAGACAGGGT |
| | | TACAATCACGTGCCGCGCCAGCCAGGACGTCAACACCGCTG |
| | | TGGCTTGGTATCAGCAAAAGCCCGGGAAGGCACCAAAGCT |
| | | GCTTATTTATAGCGCCTCCTTCTTGTATTCTGGAGTGCCATC |
| | | CAGGTTTTCCGGGTCACGTAGCGGGACTGACTTTACCCTCA |
| | | CCATATCCAGCCTCCAGCCCGAGGATTTCGCCACCTATTACT |
| | | GTCAGCAACACTACACGACTCCACCGACTTTTGGACAGGGC |
| | | ACTAAAGTGGAGATTAAGGGCAGCACGAGTGGGAGTGGAA |
| | | AGCCCGGCAGCGGGGAGGGGTCTACCAAGGGAGAGGTCCA |
| | | GCTGGTTGAATCCGGAGGCGGGCTTGTGCAACCTGGAGGCT |
| | | CCCTGAGGCTTAGTTGTGCCGCGTCAGGATTCAACATTAAG |
| | | GATACCTATATTCATTGGGTCCGACAAGCCCCGGGCAAGGG |
| | | CTTGGAGTGGGTGGCCAGAATCTATCCGACCAACGGATATA |
| | | CAAGGTACGCCGATTCTGTGAAAGGACGCTTCACCATCAGC |
| | | GCGGACACATCCAAAAACACAGCCTATCTGCAGATGAACTC |
| | | CCTTCGCGCCGAGGATACAGCCGTGTACTATTGTAGTCGGT |
| | | GGGGAGGCGACGGCTTCTACGCGATGGACTATTGGGGACA |
| | | AGGAACACTGGTGACTGTCAGTAGCACTACGACCCCAGCAC |
| | | CTAGACCTCCCACCCCAGCTCCAACTATAGCTTCCCAGCCAT |
| | | TGTCTCTCCGGCCAGAGGCGTGTCGACCAGCCGCTGGAGGG |
| | | GCCGTTCATACAAGAGGACTCGATTTCGCTTGCGATATCTA |
| | | CATATGGGCCCCTCTTGCCGGGACATGCGGTGTCCTGCTTCT |
| | | AAGCTTGGTTATTACCCTCTATTGCAAAAGAGGACGAAAGA |
| | | AACTGCTTTATATATTCAAGCAACCTTTCATGCGCCCCGTAC |
| | | AGACCACGCAGGAGGAAGATGGGTGTAGCTGTCGCTTCCCT |
| | | GAGGAAGAGGAAGGTGGATGCGAGTTGCGGGTGAAGTTCA |
| | | GTCGATCCGCCGATGCGCCTGCCTATCAGCAAGGGCAGAAC |
| | | CAGCTTTATAACGAGTTAAACCTTGGCCGCCGGGAAGAGTA |
| | | TGACGTGTTGGACAAGCGTCGCGGGAGAGACCCTGAGATG |
| | | GGCGGAAAACCAAGGAGAAAAAATCCACAGGAAGGCTTAT |
| | | ATAACGAGTTGCAGAAAGACAAGATGGCCGAGGCATACTC |
| | | CGAAATCGGAATGAAGGGCGAGCGACGGCGCGGCAAAGGC |
| | | CACGATGGACTCTATCAGGGCTTAAGCACCGCCACCAAAGA |
| | | CACCTACGATGCACTTCATATGCAGGCACTCCCACCTAGAT |
| | | GATAA |
| MC0421 | SEQ ID | MALPVTALLLPLALLLHAARPQVQLVQSGAEVKKPGASVKVS |
| HzBB7.2.2_ | NO: 276 | CKASGYTFTSYHIQWVRQAPGQRLEWIGWIYPGDGSTQYNEK |
| LIR1(52)_ | | FKGRVTITRDTSASTAYMELSSLRSEDTAVYYCAREGTYYAM |
| 2A_HER2 | | DYWGQGTLVTVSSGGGGSGGGGSGGGGSDVVMTQTPLSLSV |
| Protein | | TPGQPASISCRSSQSIVHSNGNTYLEWYLQKPGQSPQLLIYKVS |
| Sequence | | NRFSGVPDRFSGSGSGTDFTLKISRVEAEDVGVYYCFQGSHVP |
| (VR421) | | RTFGGGTKVEIKHPSDPLELVVSGPSGGPSSPTTGPTSTSGPEDQ |
| | | PLTPTGSDPQSGLGRHLGVVIGILVAVILLLLLLLLLFLILRHRR |
| | | QGKHWTSTQRKADFQHPAGAVGPEPTDRGLQWRSSPAADAQ |
| | | EENLYAAVKHTQPEDGVEMDTRSPHDEDPQAVTYAEVKHSRP |
| | | RREMASPPSPLSGEFLDTKDRQAEEDRQMDTEAAASEAPQDV |
| | | TYAQLHSLTLRREATEPPPSQEGPSPAVPSIYATLAIHRRKRGS |
| | | GEGRGSLLTCGDVEENPGPMALPVTALLLPLALLLHAARPDIQ |
| | | MTQSPSSLSASVGDRVTITCRASQDVNTAVAWYQQKPGKAPK |
| | | LLIYSASFLYSGVPSRFSGSRSGTDFTLTISSLQPEDFATYYCQQ |
| | | HYTTPPTFGQGTKVEIKGSTSGSGKPGSGEGSTKGEVQLVESG |
| | | GGLVQPGGSLRLSCAASGFNIKDTYIHWVRQAPGKGLEWVAR |
| | | IYPTNGYTRYADSVKGRFTISADTSKNTAYLQMNSLRAEDTAV |
| | | YYCSRWGGDGFYAMDYWGQGTLVTVSSTTTPAPRPPTPAPTI |
| | | ASQPLSLRPEACRPAAGGAVHTRGLDFACDIYIWAPLAGTCGV |
| | | LLLSLVITLYCKRGRKKLLYIFKQPFMRPVQTTQEEDGCSCRFP |
| | | EEEEGGCELRVKFSRSADAPAYQQGQNQLYNELNLGRREEYD |
| | | VLDKRRGRDPEMGGKPRRKNPQEGLYNELQKDKMAEAYSEI |
| | | GMKGERRRGKGHDGLYQGLSTATKDTYDALHMQALPPR |
| MC00428 | SEQ ID | ATGGCGCTGCCAGTCACTGCATTGTTATTGCCTCTGGCCCTG |
| HzBB7.2.1_ | NO: 277 | CTTCTCCATGCGGCAAGGCCACAGGTGCAACTGGTTCAATC |
| LIR1(52)_ | | TGGTGCTGAGGTGAAAAAGCCCGGCAGCTCTGTGAAAGTGA |
| (IRESL)_HER2 | | GCTGTAAGGCATCAGGGTATACCTTCACCAGCTATCACATA |
| nucleotide | | CAATGGGTCCGCCAGGCCCCCGGACAGGGATTGGAATGGAT |
| sequence | | GGGGTGGATTTACCCGGGTGACGGCTCAACCCAGTACAATG |
| (VR428) | | AGAAGTTCAAGGGCAGGACAACTATCACAGCCGATAAGTC |
| | | CACGAGCACAGCTTACATGGAGTTATCTAGCCTGAGATCCG |
| | | AAGATACGGCGGTGTATTACTGCGCGCGGGAAGGGACCTAC |
| | | TATGCCATGGACTATTGGGGACAAGGGACCCTGGTTACCGT |
| | | GAGTTCTGGGGGCGGGGGTTCCGGGGGAGGGGGATCTGGG |
| | | GGTGGAGGGAGCGATGTGGTAATGACCCAGACACCTTTGTC |
| | | TTTGAGTGTCACCCCCGGACAGCCGGCAAGTATATCCTGTA |
| | | GATCATCCCAATCAATCGTGCACTCCAACGGAAACACATAC |
| | | TTGGAATGGTATCTCCAGAAACCTGGACAGTCCCCACAGTT |
| | | GCTCATCTACAAAGTGTCAAATCGCTTTTCAGGCGTGCCCG |
| | | ATCGTTTCAGCGGCTCAGGCTCCGGGACAGACTTTACATTG |
| | | AAGATTAGCCGCGTAGAGGCAGAGGATGTGGGCGTTTACTA |
| | | TTGTTTTCAAGGGTCACACGTGCCACGCACATTCGGCGGCG |
| | | GTACCAAGGTGGAAATTAAGCACCCCAGCGACCCGCTGGA |
| | | GCTCGTTGTGTCCGGACCATCAGGGGGCCCGAGTAGCCCTA |
| | | CAACCGGCCCCACTTCTACCAGTGGACCGGAAGATCAACCA |
| | | CTTACACCAACGGGCAGCGACCCCCAGTCAGGCCTAGGGCG |
| | | CCACCTGGGTGTGGTCATCGGGATACTGGTCGCTGTCATCCT |
| | | GCTTCTGCTCCTTCTCTTGCTCCTATTCCTAATCCTGCGCCAC |
| | | AGGAGACAGGGCAAGCACTGGACCAGCACCCAGCGGAAGG |
| | | CCGACTTTCAGCACCCTGCCGGCGCCGTGGGCCCTGAGCCT |
| | | ACCGACAGGGGCCTGCAGTGGAGGAGCTCCCCAGCCGCCG |
| | | ATGCCCAGGAGGAGAATCTGTACGCCGCCGTGAAGCACACC |
| | | CAGCCAGAGGACGGCGTGGAGATGGACACCCGCTCCCCAC |
| | | ACGACGAGGACCCACAGGCCGTGACCTACGCCGAGGTGAA |
| | | GCACAGCCGCCCCAGACGCGAGATGGCCAGCCCACCCAGC |
| | | CCCCTGTCCGGCGAGTTCCTGGACACCAAGGACAGGCAGGC |
| | | CGAGGAGGACCGGCAGATGGACACCGAGGCCGCCGCCTCC |
| | | GAGGCCCCCCAGGACGTGACCTACGCCCAGCTGCACTCCCT |
| | | GACCCTGCGGAGAGAGGCCACCGAGCCCCCACCCAGCCAG |
| | | GAGGGCCCCTCCCCCGCCGTGCCTAGCATCTACGCCACCCT |
| | | GGCCATCCACTGATAACCCCCCCCCCTAACGTTACTGGCCG |
| | | AAGCCGCTTGGAATAAGGCCGGTGTGCGTTTGTCTATATGT |
| | | TATTTTCCACCATATTGCCGTCTTTTGGCAATGTGAGGGCCC |
| | | GGAAACCTGGCCCTGTCTTCTTGACGAGCATTCCTAGGGGT |
| | | CTTTCCCCTCTCGCCAAAGGAATGCAAGGTCTGTTGAATGTC |
| | | GTGAAGGAAGCAGTTCCTCTGGAAGCTTCTTGAAGACAAAC |
| | | AACGTCTGTAGCGACCCTTTGCAGGCAGCGGAACCCCCCAC |
| | | CTGGCGACAGGTGCCTCTGCGGCCAAAAGCCACGTGTATAA |
| | | GATACACCTGCAAAGGCGGCACAACCCCAGTGCCACGTTGT |
| | | GAGTTGGATAGTTGTGGAAAGAGTCAAATGGCTCTCCTCAA |
| | | GCGTATTCAACAAGGGGCTGAAGGATGCCCAGAAGGTACC |
| | | CCATTGTATGGGATCTGATCTGGGGCCTCGGTGCACATGCTT |
| | | TACATGTGTTTAGTCGAGGTTAAAAAAACGTCTAGGCCCCC |
| | | CGAACCACGGGGACGTGGTTTTCCTTTGAAAAACACGATGA |
| | | TAATATGATGGCGCTGCCAGTCACTGCATTGTTATTGCCTCT |
| | | GGCCCTGCTTCTCCATGCGGCGCGCCCAGACATCCAGATGA |
| | | CCCAATCCCCAAGCAGTCTCTCAGCCAGCGTGGGAGACAGG |
| | | GTTACAATCACGTGCCGCGCCAGCCAGGACGTCAACACCGC |
| | | TGTGGCTTGGTATCAGCAAAAGCCCGGGAAGGCACCAAAG |
| | | CTGCTTATTTATAGCGCCTCCTTCTTGTATTCTGGAGTGCCA |
| | | TCCAGGTTTTCCGGGTCACGTAGCGGGACTGACTTTACCCTC |
| | | ACCATATCCAGCCTCCAGCCCGAGGATTTCGCCACCTATTA |
| | | CTGTCAGCAACACTACACGACTCCACCGACTTTTGGACAGG |
| | | GCACTAAAGTGGAGATTAAGGGCAGCACGAGTGGGAGTGG |
| | | AAAGCCCGGCAGCGGGGAGGGGTCTACCAAGGGAGAGGTC |
| | | CAGCTGGTTGAATCCGGAGGCGGGCTTGTGCAACCTGGAGG |
| | | CTCCCTGAGGCTTAGTTGTGCCGCGTCAGGATTCAACATTA |
| | | AGGATACCTATATTCATTGGGTCCGACAAGCCCCGGGCAAG |
| | | GGCTTGGAGTGGGTGGCCAGAATCTATCCGACCAACGGATA |
| | | TACAAGGTACGCCGATTCTGTGAAAGGACGCTTCACCATCA |
| | | GCGCGGACACATCCAAAAACACAGCCTATCTGCAGATGAAC |
| | | TCCCTTCGCGCCGAGGATACAGCCGTGTACTATTGTAGTCG |
| | | GTGGGGAGGCGACGGCTTCTACGCGATGGACTATTGGGGAC |
| | | AAGGAACACTGGTGACTGTCAGTAGCACTACGACCCCAGCA |
| | | CCTAGACCTCCCACCCCAGCTCCAACTATAGCTTCCCAGCC |
| | | ATTGTCTCTCCGGCCAGAGGCGTGTCGACCAGCCGCTGGAG |
| | | GGGCCGTTCATACAAGAGGACTCGATTTCGCTTGCGATATC |
| | | TACATATGGGCCCCTCTTGCCGGGACATGCGGTGTCCTGCTT |
| | | CTAAGCTTGGTTATTACCCTCTATTGCAAAAGAGGACGAAA |
| | | GAAACTGCTTTATATATTCAAGCAACCTTTCATGCGCCCCGT |
| | | ACAGACCACGCAGGAGGAAGATGGGTGTAGCTGTCGCTTCC |
| | | CTGAGGAAGAGGAAGGTGGATGCGAGTTGCGGGTGAAGTT |
| | | CAGTCGATCCGCCGATGCGCCTGCCTATCAGCAAGGGCAGA |
| | | ACCAGCTTTATAACGAGTTAAACCTTGGCCGCCGGGAAGAG |
| | | TATGACGTGTTGGACAAGCGTCGCGGGAGAGACCCTGAGAT |
| | | GGGCGGAAAACCAAGGAGAAAAAATCCACAGGAAGGCTTA |
| | | TATAACGAGTTGCAGAAAGACAAGATGGCCGAGGCATACT |
| | | CCGAAATCGGAATGAAGGGCGAGCGACGGCGCGGCAAAGG |
| | | CCACGATGGACTCTATCAGGGCTTAAGCACCGCCACCAAAG |
| | | ACACCTACGATGCACTTCATATGCAGGCACTCCCACCTAGA |
| | | TGATAA |
| MC0428 | SEQ ID | MALPVTALLLPLALLLHAARPQVQLVQSGAEVKKPGSSVKVS |
| HzBB7.2.1_ | NO: 278 | CKASGYTFTSYHIQWVRQAPGQGLEWMGWIYPGDGSTQYNE |
| LIR1(52)_ | | KFKGRTTITADKSTSTAYMELSSLRSEDTAVYYCAREGTYYA |
| (IRESL)_ | | MDYWGQGTLVTVSSGGGGSGGGGSGGGGSDVVMTQTPLSLS |
| HER2 Protein | | VTPGQPASISCRSSQSIVHSNGNTYLEWYLQKPGQSPQLLIYKV |
| sequence | | SNRFSGVPDRFSGSGSGTDFTLKISRVEAEDVGVYYCFQGSHV |
| (VR428) | | PRTFGGGTKVEIKHPSDPLELVVSGPSGGPSSPTTGPTSTSGPED |
| | | QPLTPTGSDPQSGLGRHLGVVIGILVAVILLLLLLLLLFLILRHR |
| | | RQGKHWTSTQRKADFQHPAGAVGPEPTDRGLQWRSSPAADA |
| | | QEENLYAAVKHTQPEDGVEMDTRSPHDEDPQAVTYAEVKHS |
| | | RPRREMASPPSPLSGEFLDTKDRQAEEDRQMDTEAAASEAPQD |
| | | VTYAQLHSLTLRREATEPPPSQEGPSPAVPSIYATLAIH* |
| | | MALPVTALLLPLALLLHAARPDIQMTQSPSSLSASVGDRVTITC |
| | | RASQDVNTAVAWYQQKPGKAPKLLIYSASFLYSGVPSRFSGSR |
| | | SGTDFTLTISSLQPEDFATYYCQQHYTTPPTFGQGTKVEIKGST |
| | | SGSGKPGSGEGSTKGEVQLVESGGGLVQPGGSLRLSCAASGEN |
| | | IKDTYIHWVRQAPGKGLEWVARIYPTNGYTRYADSVKGRFTIS |
| | | ADTSKNTAYLQMNSLRAEDTAVYYCSRWGGDGFYAMDYWG |
| | | QGTLVTVSSTTTPAPRPPTPAPTIASQPLSLRPEACRPAAGGAV |
| | | HTRGLDFACDIYIWAPLAGTCGVLLLSLVITLYCKRGRKKLLYI |
| | | FKQPFMRPVQTTQEEDGCSCRFPEEEEGGCELRVKFSRSADAP |
| | | AYQQGQNQLYNELNLGRREEYDVLDKRRGRDPEMGGKPRRK |
| | | NPQEGLYNELQKDKMAEAYSEIGMKGERRRGKGHDGLYQGL |
| | | STATKDTYDALHMQALPPR* |
| MC0447 | SEQ ID | ATGGCGCTGCCAGTCACTGCATTGTTATTGCCTCTGGCCCTG |
| SN66E3.2 | NO: 279 | CTTCTCCATGCGGCAAGGCCAGATATAGTGATGACACAGTC |
| (LH)_LIR1 | | CCCCGACTCCCTGGCTGTCTCACTGGGAGAACGAGCGACGA |
| (30)_ | | TTAGTTGTAAGTCTAGCCAGAGCGTCCTGTATTCAAGCAAT |
| (IRESL)_HER2 | | AACAAGAATTACCTCGCCTGGTATCAGCAAAAGCCGGGACA |
| nucleotide | | GCCACCCAAACTGTTGATTTACTGGGCCAGCACGAGAGAGA |
| Sequence | | GCGGAGTGCCCGACCGCTTCAGCGGATCCGGGTCAGGCACA |
| (VR447) | | GATTTTACCCTGACTATTAGCTCCCTTCAAGCGGAAGATGTC |
| | | GCCGTCTACTATTGCCAGCAATATTACGGAACTCCATTCAC |
| | | ATTCGGCGGTGGGACCAAAGTAGAGATAAAGGGTGGCGGG |
| | | GGATCCGGCGGTGGCGGTAGCGGGGGAGGCGGGTCCCAAG |
| | | TGCAACTAGTCCAATCAGGTGCCGAAGTCAAGAAACCAGGT |
| | | GCATCCGTGAAAGTGTCTTGCAAAGCCAGTGGCTACACTTT |
| | | TACTGACTACTATCTGCACTGGGTGCGTCAAGCACCCGGCC |
| | | AGGGGCTTGAATGGATGGGCTGGATTAACCCTTATACTGGA |
| | | GGGACAAATTACGCTCAGAAGTTCCAGGGACGCGTTACAAT |
| | | GACCCGAGACACCAGCATCAGCACAGCGTACATGGAGTTA |
| | | AGTGGGCTGACTTCCGACGATACCGCCGTGTATTACTGCGC |
| | | TCGGGCAGGGGCCTCTTACTATGATTTTTGGTCCGGTTGGGT |
| | | CTTCGATTACTGGGGGCAGGGAACCCTGGTGACAGTGTCCT |
| | | CAGGCCCCACTTCTACCAGTGGACCGGAAGATCAACCACTT |
| | | ACACCAACGGGCAGCGACCCCCAGTCAGGCCTAGGGCGCC |
| | | ACCTGGGTGTGGTCATCGGGATACTGGTCGCTGTCATCCTG |
| | | CTTCTGCTCCTTCTCTTGCTCCTATTCCTAATCCTGCGCCACA |
| | | GGAGACAGGGCAAGCACTGGACCAGCACCCAGCGGAAGGC |
| | | CGACTTTCAGCACCCTGCCGGCGCCGTGGGCCCTGAGCCTA |
| | | CCGACAGGGGCCTGCAGTGGAGGAGCTCCCCAGCCGCCGAT |
| | | GCCCAGGAGGAGAATCTGTACGCCGCCGTGAAGCACACCC |
| | | AGCCAGAGGACGGCGTGGAGATGGACACCCGCTCCCCACA |
| | | CGACGAGGACCCACAGGCCGTGACCTACGCCGAGGTGAAG |
| | | CACAGCCGCCCCAGACGCGAGATGGCCAGCCCACCCAGCCC |
| | | CCTGTCCGGCGAGTTCCTGGACACCAAGGACAGGCAGGCCG |
| | | AGGAGGACCGGCAGATGGACACCGAGGCCGCCGCCTCCGA |
| | | GGCCCCCCAGGACGTGACCTACGCCCAGCTGCACTCCCTGA |
| | | CCCTGCGGAGAGAGGCCACCGAGCCCCCACCCAGCCAGGA |
| | | GGGCCCCTCCCCCGCCGTGCCTAGCATCTACGCCACCCTGG |
| | | CCATCCACTGATAACCCCCCCCCCTAACGTTACTGGCCGAA |
| | | GCCGCTTGGAATAAGGCCGGTGTGCGTTTGTCTATATGTTAT |
| | | TTTCCACCATATTGCCGTCTTTTGGCAATGTGAGGGCCCGGA |
| | | AACCTGGCCCTGTCTTCTTGACGAGCATTCCTAGGGGTCTTT |
| | | CCCCTCTCGCCAAAGGAATGCAAGGTCTGTTGAATGTCGTG |
| | | AAGGAAGCAGTTCCTCTGGAAGCTTCTTGAAGACAAACAAC |
| | | GTCTGTAGCGACCCTTTGCAGGCAGCGGAACCCCCCACCTG |
| | | GCGACAGGTGCCTCTGCGGCCAAAAGCCACGTGTATAAGAT |
| | | ACACCTGCAAAGGCGGCACAACCCCAGTGCCACGTTGTGAG |
| | | TTGGATAGTTGTGGAAAGAGTCAAATGGCTCTCCTCAAGCG |
| | | TATTCAACAAGGGGCTGAAGGATGCCCAGAAGGTACCCCAT |
| | | TGTATGGGATCTGATCTGGGGCCTCGGTGCACATGCTTTAC |
| | | ATGTGTTTAGTCGAGGTTAAAAAAACGTCTAGGCCCCCCGA |
| | | ACCACGGGGACGTGGTTTTCCTTTGAAAAACACGATGATAA |
| | | TATGATGGCGCTGCCAGTCACTGCATTGTTATTGCCTCTGGC |
| | | CCTGCTTCTCCATGCGGCGCGCCCAGACATCCAGATGACCC |
| | | AATCCCCAAGCAGTCTCTCAGCCAGCGTGGGAGACAGGGTT |
| | | ACAATCACGTGCCGCGCCAGCCAGGACGTCAACACCGCTGT |
| | | GGCTTGGTATCAGCAAAAGCCCGGGAAGGCACCAAAGCTG |
| | | CTTATTTATAGCGCCTCCTTCTTGTATTCTGGAGTGCCATCC |
| | | AGGTTTTCCGGGTCACGTAGCGGGACTGACTTTACCCTCAC |
| | | CATATCCAGCCTCCAGCCCGAGGATTTCGCCACCTATTACTG |
| | | TCAGCAACACTACACGACTCCACCGACTTTTGGACAGGGCA |
| | | CTAAAGTGGAGATTAAGGGCAGCACGAGTGGGAGTGGAAA |
| | | GCCCGGCAGCGGGGAGGGGTCTACCAAGGGAGAGGTCCAG |
| | | CTGGTTGAATCCGGAGGCGGGCTTGTGCAACCTGGAGGCTC |
| | | CCTGAGGCTTAGTTGTGCCGCGTCAGGATTCAACATTAAGG |
| | | ATACCTATATTCATTGGGTCCGACAAGCCCCGGGCAAGGGC |
| | | TTGGAGTGGGTGGCCAGAATCTATCCGACCAACGGATATAC |
| | | AAGGTACGCCGATTCTGTGAAAGGACGCTTCACCATCAGCG |
| | | CGGACACATCCAAAAACACAGCCTATCTGCAGATGAACTCC |
| | | CTTCGCGCCGAGGATACAGCCGTGTACTATTGTAGTCGGTG |
| | | GGGAGGCGACGGCTTCTACGCGATGGACTATTGGGGACAA |
| | | GGAACACTGGTGACTGTCAGTAGCACTACGACCCCAGCACC |
| | | TAGACCTCCCACCCCAGCTCCAACTATAGCTTCCCAGCCATT |
| | | GTCTCTCCGGCCAGAGGCGTGTCGACCAGCCGCTGGAGGGG |
| | | CCGTTCATACAAGAGGACTCGATTTCGCTTGCGATATCTAC |
| | | ATATGGGCCCCTCTTGCCGGGACATGCGGTGTCCTGCTTCTA |
| | | AGCTTGGTTATTACCCTCTATTGCAAAAGAGGACGAAAGAA |
| | | ACTGCTTTATATATTCAAGCAACCTTTCATGCGCCCCGTACA |
| | | GACCACGCAGGAGGAAGATGGGTGTAGCTGTCGCTTCCCTG |
| | | AGGAAGAGGAAGGTGGATGCGAGTTGCGGGTGAAGTTCAG |
| | | TCGATCCGCCGATGCGCCTGCCTATCAGCAAGGGCAGAACC |
| | | AGCTTTATAACGAGTTAAACCTTGGCCGCCGGGAAGAGTAT |
| | | GACGTGTTGGACAAGCGTCGCGGGAGAGACCCTGAGATGG |
| | | GCGGAAAACCAAGGAGAAAAAATCCACAGGAAGGCTTATA |
| | | TAACGAGTTGCAGAAAGACAAGATGGCCGAGGCATACTCC |
| | | GAAATCGGAATGAAGGGCGAGCGACGGCGCGGCAAAGGCC |
| | | ACGATGGACTCTATCAGGGCTTAAGCACCGCCACCAAAGAC |
| | | ACCTACGATGCACTTCATATGCAGGCACTCCCACCTAGATG |
| | | ATAA |
| MC0447 | SEQ ID | MALPVTALLLPLALLLHAARPDIVMTQSPDSLAVSLGERATISC |
| SN66E3.2 | NO: 280 | KSSQSVLYSSNNKNYLAWYQQKPGQPPKLLIYWASTRESGVP |
| (LH)_LIR1 | | DRESGSGSGTDFTLTISSLQAEDVAVYYCQQYYGTPFTFGGGT |
| (30)_ | | KVEIKGGGGSGGGGSGGGGSQVQLVQSGAEVKKPGASVKVS |
| (IRESL)_HER2 | | CKASGYTFTDYYLHWVRQAPGQGLEWMGWINPYTGGTNYA |
| Protein | | QKFQGRVTMTRDTSISTAYMELSGLTSDDTAVYYCARAGASY |
| Sequence | | YDFWSGWVFDYWGQGTLVTVSSGPTSTSGPEDQPLTPTGSDP |
| (VR447) | | QSGLGRHLGVVIGILVAVILLLLLLLLLFLILRHRRQGKHWTST |
| | | QRKADFQHPAGAVGPEPTDRGLQWRSSPAADAQEENLYAAV |
| | | KHTQPEDGVEMDTRSPHDEDPQAVTYAEVKHSRPRREMASPP |
| | | SPLSGEFLDTKDRQAEEDRQMDTEAAASEAPQDVTYAQLHSL |
| | | TLRREATEPPPSQEGPSPAVPSIYATLAIH* |
| | | MALPVTALLLPLALLLHAARPDIQMTQSPSSLSASVGDRVTITC |
| | | RASQDVNTAVAWYQQKPGKAPKLLIYSASFLYSGVPSRFSGSR |
| | | SGTDFTLTISSLQPEDFATYYCQQHYTTPPTFGQGTKVEIKGST |
| | | SGSGKPGSGEGSTKGEVQLVESGGGLVQPGGSLRLSCAASGEN |
| | | IKDTYIHWVRQAPGKGLEWVARIYPTNGYTRYADSVKGRFTIS |
| | | ADTSKNTAYLQMNSLRAEDTAVYYCSRWGGDGFYAMDYWG |
| | | QGTLVTVSSTTTPAPRPPTPAPTIASQPLSLRPEACRPAAGGAV |
| | | HTRGLDFACDIYIWAPLAGTCGVLLLSLVITLYCKRGRKKLLYI |
| | | FKQPFMRPVQTTQEEDGCSCRFPEEEEGGCELRVKFSRSADAP |
| | | AYQQGQNQLYNELNLGRREEYDVLDKRRGRDPEMGGKPRRK |
| | | NPQEGLYNELQKDKMAEAYSEIGMKGERRRGKGHDGLYQGL |
| | | STATKDTYDALHMQALPPR* |
| MC0449 | SEQ ID | ATGGCGCTGCCAGTCACTGCATTGTTATTGCCTCTGGCCCTG |
| SN66E3.3 | NO: 281 | CTTCTCCATGCGGCAAGGCCAGATATAGTGATGACACAGTC |
| (LH)_LIR1 | | CCCCGACTCCCTGGCTGTCTCACTGGGAGAACGAGCGACGA |
| (26)_ | | TTAGTTGTAAGTCTAGCCAGAGCGTCCTGTATTCAAGCAAT |
| (IRESL)_HER2 | | AACAAGAATTACCTCGCCTGGTATCAGCAAAAGCCGGGACA |
| Nucleotide | | GCCACCCAAACTGTTGATTTACTGGGCCAGCACGAGAGAGA |
| Sequence | | GCGGAGTGCCCGACCGCTTCAGCGGATCCGGGTCAGGCACA |
| (VR449) | | GATTTTACCCTGACTATTAGCTCCCTTCAAGCGGAAGATGTC |
| | | GCCGTCTACTATTGCCAGCAATATTACGGAACTCCATTCAC |
| | | ATTCGGCGGTGGGACCAAAGTAGAGATAAAGGGTGGCGGG |
| | | GGATCCGGCGGTGGCGGTAGCGGGGGAGGCGGGTCCCAAG |
| | | TGCAACTAGTCCAATCAGGTGCCGAAGTCAAGAAACCAGGT |
| | | GCATCCGTGAAAGTGTCTTGCAAAGCCAGTGGCTACACTTT |
| | | TACTGACTACTATCTGCACTGGGTGCGTCAAGCACCCGGCC |
| | | AGGGGCTTGAATGGATGGGCTGGATTAACCCTTATACTGGA |
| | | GGGACAAATTACGCTCAGAAGTTCCAGGGACGCGTTACAAT |
| | | GACCCGAGACACCAGCATCAGCACAGCGTACATGGAGTTA |
| | | AGTAGGCTGAGGTCCGAAGATACCGCCGTGTATTACTGCGC |
| | | TCGGGCAGGGGCCTCTTACTATGATTTTTGGTCCGGTTGGGT |
| | | CTTCGATTACTGGGGGCAGGGAACCCTGGTGACAGTGTCCT |
| | | CAACCAGTGGACCGGAAGATCAACCACTTACACCAACGGG |
| | | CAGCGACCCCCAGTCAGGCCTAGGGCGCCACCTGGGTGTGG |
| | | TCATCGGGATACTGGTCGCTGTCATCCTGCTTCTGCTCCTTC |
| | | TCTTGCTCCTATTCCTAATCCTGCGCCACAGGAGACAGGGC |
| | | AAGCACTGGACCAGCACCCAGCGGAAGGCCGACTTTCAGC |
| | | ACCCTGCCGGCGCCGTGGGCCCTGAGCCTACCGACAGGGGC |
| | | CTGCAGTGGAGGAGCTCCCCAGCCGCCGATGCCCAGGAGG |
| | | AGAATCTGTACGCCGCCGTGAAGCACACCCAGCCAGAGGA |
| | | CGGCGTGGAGATGGACACCCGCTCCCCACACGACGAGGAC |
| | | CCACAGGCCGTGACCTACGCCGAGGTGAAGCACAGCCGCCC |
| | | CAGACGCGAGATGGCCAGCCCACCCAGCCCCCTGTCCGGCG |
| | | AGTTCCTGGACACCAAGGACAGGCAGGCCGAGGAGGACCG |
| | | GCAGATGGACACCGAGGCCGCCGCCTCCGAGGCCCCCCAG |
| | | GACGTGACCTACGCCCAGCTGCACTCCCTGACCCTGCGGAG |
| | | AGAGGCCACCGAGCCCCCACCCAGCCAGGAGGGCCCCTCCC |
| | | CCGCCGTGCCTAGCATCTACGCCACCCTGGCCATCCACTGA |
| | | TAACCCCCCCCCCTAACGTTACTGGCCGAAGCCGCTTGGAA |
| | | TAAGGCCGGTGTGCGTTTGTCTATATGTTATTTTCCACCATA |
| | | TTGCCGTCTTTTGGCAATGTGAGGGCCCGGAAACCTGGCCC |
| | | TGTCTTCTTGACGAGCATTCCTAGGGGTCTTTCCCCTCTCGC |
| | | CAAAGGAATGCAAGGTCTGTTGAATGTCGTGAAGGAAGCA |
| | | GTTCCTCTGGAAGCTTCTTGAAGACAAACAACGTCTGTAGC |
| | | GACCCTTTGCAGGCAGCGGAACCCCCCACCTGGCGACAGGT |
| | | GCCTCTGCGGCCAAAAGCCACGTGTATAAGATACACCTGCA |
| | | AAGGCGGCACAACCCCAGTGCCACGTTGTGAGTTGGATAGT |
| | | TGTGGAAAGAGTCAAATGGCTCTCCTCAAGCGTATTCAACA |
| | | AGGGGCTGAAGGATGCCCAGAAGGTACCCCATTGTATGGG |
| | | ATCTGATCTGGGGCCTCGGTGCACATGCTTTACATGTGTTTA |
| | | GTCGAGGTTAAAAAAACGTCTAGGCCCCCCGAACCACGGG |
| | | GACGTGGTTTTCCTTTGAAAAACACGATGATAATATGATGG |
| | | CGCTGCCAGTCACTGCATTGTTATTGCCTCTGGCCCTGCTTC |
| | | TCCATGCGGCGCGCCCAGACATCCAGATGACCCAATCCCCA |
| | | AGCAGTCTCTCAGCCAGCGTGGGAGACAGGGTTACAATCAC |
| | | GTGCCGCGCCAGCCAGGACGTCAACACCGCTGTGGCTTGGT |
| | | ATCAGCAAAAGCCCGGGAAGGCACCAAAGCTGCTTATTTAT |
| | | AGCGCCTCCTTCTTGTATTCTGGAGTGCCATCCAGGTTTTCC |
| | | GGGTCACGTAGCGGGACTGACTTTACCCTCACCATATCCAG |
| | | CCTCCAGCCCGAGGATTTCGCCACCTATTACTGTCAGCAAC |
| | | ACTACACGACTCCACCGACTTTTGGACAGGGCACTAAAGTG |
| | | GAGATTAAGGGCAGCACGAGTGGGAGTGGAAAGCCCGGCA |
| | | GCGGGGAGGGGTCTACCAAGGGAGAGGTCCAGCTGGTTGA |
| | | ATCCGGAGGCGGGCTTGTGCAACCTGGAGGCTCCCTGAGGC |
| | | TTAGTTGTGCCGCGTCAGGATTCAACATTAAGGATACCTAT |
| | | ATTCATTGGGTCCGACAAGCCCCGGGCAAGGGCTTGGAGTG |
| | | GGTGGCCAGAATCTATCCGACCAACGGATATACAAGGTACG |
| | | CCGATTCTGTGAAAGGACGCTTCACCATCAGCGCGGACACA |
| | | TCCAAAAACACAGCCTATCTGCAGATGAACTCCCTTCGCGC |
| | | CGAGGATACAGCCGTGTACTATTGTAGTCGGTGGGGAGGCG |
| | | ACGGCTTCTACGCGATGGACTATTGGGGACAAGGAACACTG |
| | | GTGACTGTCAGTAGCACTACGACCCCAGCACCTAGACCTCC |
| | | CACCCCAGCTCCAACTATAGCTTCCCAGCCATTGTCTCTCCG |
| | | GCCAGAGGCGTGTCGACCAGCCGCTGGAGGGGCCGTTCATA |
| | | CAAGAGGACTCGATTTCGCTTGCGATATCTACATATGGGCC |
| | | CCTCTTGCCGGGACATGCGGTGTCCTGCTTCTAAGCTTGGTT |
| | | ATTACCCTCTATTGCAAAAGAGGACGAAAGAAACTGCTTTA |
| | | TATATTCAAGCAACCTTTCATGCGCCCCGTACAGACCACGC |
| | | AGGAGGAAGATGGGTGTAGCTGTCGCTTCCCTGAGGAAGA |
| | | GGAAGGTGGATGCGAGTTGCGGGTGAAGTTCAGTCGATCCG |
| | | CCGATGCGCCTGCCTATCAGCAAGGGCAGAACCAGCTTTAT |
| | | AACGAGTTAAACCTTGGCCGCCGGGAAGAGTATGACGTGTT |
| | | GGACAAGCGTCGCGGGAGAGACCCTGAGATGGGCGGAAAA |
| | | CCAAGGAGAAAAAATCCACAGGAAGGCTTATATAACGAGT |
| | | TGCAGAAAGACAAGATGGCCGAGGCATACTCCGAAATCGG |
| | | AATGAAGGGCGAGCGACGGCGCGGCAAAGGCCACGATGGA |
| | | CTCTATCAGGGCTTAAGCACCGCCACCAAAGACACCTACGA |
| | | TGCACTTCATATGCAGGCACTCCCACCTAGATGATAA |
| MC0449 | SEQ ID | MALPVTALLLPLALLLHAARPDIVMTQSPDSLAVSLGERATISC |
| SN66E3.3 | NO: 282 | KSSQSVLYSSNNKNYLAWYQQKPGQPPKLLIYWASTRESGVP |
| (LH)_LIR1 | | DRFSGSGSGTDFTLTISSLQAEDVAVYYCQQYYGTPFTFGGGT |
| (26)_ | | KVEIKGGGGSGGGGSGGGGSQVQLVQSGAEVKKPGASVKVS |
| (IRESL)_HER2 | | CKASGYTFTDYYLHWVRQAPGQGLEWMGWINPYTGGTNYA |
| Protein | | QKFQGRVTMTRDTSISTAYMELSRLRSEDTAVYYCARAGASY |
| Sequence | | YDFWSGWVFDYWGQGTLVTVSSTSGPEDQPLTPTGSDPQSGL |
| (VR449) | | GRHLGVVIGILVAVILLLLLLLLLFLILRHRRQGKHWTSTQRKA |
| | | DFQHPAGAVGPEPTDRGLQWRSSPAADAQEENLYAAVKHTQP |
| | | EDGVEMDTRSPHDEDPQAVTYAEVKHSRPRREMASPPSPLSGE |
| | | FLDTKDRQAEEDRQMDTEAAASEAPQDVTYAQLHSLTLRREA |
| | | TEPPPSQEGPSPAVPSIYATLAIH* |
| | | MALPVTALLLPLALLLHAARPDIQMTQSPSSLSASVGDRVTITC |
| | | RASQDVNTAVAWYQQKPGKAPKLLIYSASFLYSGVPSRESGSR |
| | | SGTDFTLTISSLQPEDFATYYCQQHYTTPPTFGQGTKVEIKGST |
| | | SGSGKPGSGEGSTKGEVQLVESGGGLVQPGGSLRLSCAASGEN |
| | | IKDTYIHWVRQAPGKGLEWVARIYPTNGYTRYADSVKGRFTIS |
| | | ADTSKNTAYLQMNSLRAEDTAVYYCSRWGGDGFYAMDYWG |
| | | QGTLVTVSSTTTPAPRPPTPAPTIASQPLSLRPEACRPAAGGAV |
| | | HTRGLDFACDIYIWAPLAGTCGVLLLSLVITLYCKRGRKKLLYI |
| | | FKQPFMRPVQTTQEEDGCSCRFPEEEEGGCELRVKFSRSADAP |
| | | AYQQGQNQLYNELNLGRREEYDVLDKRRGRDPEMGGKPRRK |
| | | NPQEGLYNELQKDKMAEAYSEIGMKGERRRGKGHDGLYQGL |
| | | STATKDTYDALHMQALPPR* |
| MC0515- | SEQ ID | ATGGCGCTGCCAGTCACTGCATTGTTATTGCCTCTGGCCCTG |
| HzBB7.2(2)_ | NO: 321 | TGGTGCTGAGGTGAAAAAGCCCGGCGCATCCGTGAAAGTG |
| LIR1(30)_ | | CTTCTCCATGCGGCAAGGCCACAGGTGCAACTGGTTCAATC |
| 2A_HER2 | | AGCTGTAAGGCATCAGGGTACACCTTCACCAGCTATCACAT |
| Nucleotide | | ACAATGGGTCCGCCAGGCCCCCGGACAGAGGTTGGAATGG |
| Sequence | | TGAGAAGTTCAAGGGCAGGGTGACTATCACACGCGATACCT |
| (VR515) | | ATTGGGTGGATTTACCCGGGTGACGGCTCAACCCAGTACAA |
| | | CCGCGAGCACAGCTTACATGGAGTTATCTAGCCTGAGATCC |
| | | GAAGATACGGCGGTGTATTACTGCGCGCGGGAAGGGACCT |
| | | ACTATGCCATGGACTATTGGGGACAAGGGACCCTGGTTACC |
| | | GTGAGTTCTGGGGGCGGGGGTTCCGGGGGAGGGGGATCTG |
| | | GGGGTGGAGGGAGCGATGTGGTAATGACCCAGACACCTTTG |
| | | TCTTTGAGTGTCACCCCCGGACAGCCGGCAAGTATATCCTG |
| | | TAGATCATCCCAATCAATCGTGCACTCCAACGGAAACACAT |
| | | ACTTGGAATGGTATCTCCAGAAACCTGGACAGTCCCCACAG |
| | | TTGCTCATCTACAAAGTGTCAAATCGCTTTTCAGGCGTGCCC |
| | | GATCGTTTCAGCGGCTCAGGCTCCGGGACAGACTTTACATT |
| | | GAAGATTAGCCGCGTAGAGGCAGAGGATGTGGGCGTTTACT |
| | | ATTGTTTTCAAGGGTCACACGTGCCACGCACATTCGGCGGC |
| | | GGTACCAAGGTGGAAATTAAGGGCCCCACTTCTACCAGTGG |
| | | ACCGGAAGATCAACCACTTACACCAACGGGCAGCGACCCCC |
| | | AGTCAGGCCTAGGGCGCCACCTGGGTGTGGTCATCGGGATA |
| | | CTGGTCGCTGTCATCCTGCTTCTGCTCCTTCTCTTGCTCCTAT |
| | | TCCTAATCCTGCGCCACAGGAGACAGGGCAAGCACTGGACC |
| | | AGCACCCAGCGGAAGGCCGACTTTCAGCACCCTGCCGGCGC |
| | | CGTGGGCCCTGAGCCTACCGACAGGGGCCTGCAGTGGAGG |
| | | AGCTCCCCAGCCGCCGATGCCCAGGAGGAGAATCTGTACGC |
| | | CGCCGTGAAGCACACCCAGCCAGAGGACGGCGTGGAGATG |
| | | GACACCCGCTCCCCACACGACGAGGACCCACAGGCCGTGAC |
| | | CTACGCCGAGGTGAAGCACAGCCGCCCCAGACGCGAGATG |
| | | GCCAGCCCACCCAGCCCCCTGTCCGGCGAGTTCCTGGACAC |
| | | CAAGGACAGGCAGGCCGAGGAGGACCGGCAGATGGACACC |
| | | GAGGCCGCCGCCTCCGAGGCCCCCCAGGACGTGACCTACGC |
| | | CCAGCTGCACTCCCTGACCCTGCGGAGAGAGGCCACCGAGC |
| | | CCCCACCCAGCCAGGAGGGCCCCTCCCCCGCCGTGCCTAGC |
| | | ATCTACGCCACCCTGGCCATCCACGGATCCGGGGAAGGCCG |
| | | AGGCTCCCTTCTAACATGTGGAGATGTCGAGGAAAACCCTG |
| | | GCCCTATGGCGCTGCCAGTCACTGCATTGTTATTGCCTCTGG |
| | | CCCTGCTTCTCCATGCGGCGCGCCCAGACATCCAGATGACC |
| | | CAATCCCCAAGCAGTCTCTCAGCCAGCGTGGGAGACAGGGT |
| | | TACAATCACGTGCCGCGCCAGCCAGGACGTCAACACCGCTG |
| | | TGGCTTGGTATCAGCAAAAGCCCGGGAAGGCACCAAAGCT |
| | | GCTTATTTATAGCGCCTCCTTCTTGTATTCTGGAGTGCCATC |
| | | CAGGTTTTCCGGGTCACGTAGCGGGACTGACTTTACCCTCA |
| | | CCATATCCAGCCTCCAGCCCGAGGATTTCGCCACCTATTACT |
| | | GTCAGCAACACTACACGACTCCACCGACTTTTGGACAGGGC |
| | | ACTAAAGTGGAGATTAAGGGCAGCACGAGTGGGAGTGGAA |
| | | AGCCCGGCAGCGGGGAGGGGTCTACCAAGGGAGAGGTCCA |
| | | GCTGGTTGAATCCGGAGGCGGGCTTGTGCAACCTGGAGGCT |
| | | CCCTGAGGCTTAGTTGTGCCGCGTCAGGATTCAACATTAAG |
| | | GATACCTATATTCATTGGGTCCGACAAGCCCCGGGCAAGGG |
| | | CTTGGAGTGGGTGGCCAGAATCTATCCGACCAACGGATATA |
| | | CAAGGTACGCCGATTCTGTGAAAGGACGCTTCACCATCAGC |
| | | GCGGACACATCCAAAAACACAGCCTATCTGCAGATGAACTC |
| | | CCTTCGCGCCGAGGATACAGCCGTGTACTATTGTAGTCGGT |
| | | GGGGAGGCGACGGCTTCTACGCGATGGACTATTGGGGACA |
| | | AGGAACACTGGTGACTGTCAGTAGCACTACGACCCCAGCAC |
| | | CTAGACCTCCCACCCCAGCTCCAACTATAGCTTCCCAGCCAT |
| | | TGTCTCTCCGGCCAGAGGCGTGTCGACCAGCCGCTGGAGGG |
| | | GCCGTTCATACAAGAGGACTCGATTTCGCTTGCGATATCTA |
| | | CATATGGGCCCCTCTTGCCGGGACATGCGGTGTCCTGCTTCT |
| | | AAGCTTGGTTATTACCCTCTATTGCAAAAGAGGACGAAAGA |
| | | AACTGCTTTATATATTCAAGCAACCTTTCATGCGCCCCGTAC |
| | | AGACCACGCAGGAGGAAGATGGGTGTAGCTGTCGCTTCCCT |
| | | GAGGAAGAGGAAGGTGGATGCGAGTTGCGGGTGAAGTTCA |
| | | GTCGATCCGCCGATGCGCCTGCCTATCAGCAAGGGCAGAAC |
| | | CAGCTTTATAACGAGTTAAACCTTGGCCGCCGGGAAGAGTA |
| | | TGACGTGTTGGACAAGCGTCGCGGGAGAGACCCTGAGATG |
| | | GGCGGAAAACCAAGGAGAAAAAATCCACAGGAAGGCTTAT |
| | | ATAACGAGTTGCAGAAAGACAAGATGGCCGAGGCATACTC |
| | | CGAAATCGGAATGAAGGGCGAGCGACGGCGCGGCAAAGGC |
| | | CACGATGGACTCTATCAGGGCTTAAGCACCGCCACCAAAGA |
| | | CACCTACGATGCACTTCATATGCAGGCACTCCCACCTAGAT |
| | | GATAA |
| MC0515 | SEQ ID | MALPVTALLLPLALLLHAARPQVQLVQSGAEVKKPGASVKVS |
| HzBB7.2(2)_ | NO: 322 | CKASGYTFTSYHIQWVRQAPGQRLEWIGWIYPGDGSTQYNEK |
| LIR1(30)_ | | FKGRVTITRDTSASTAYMELSSLRSEDTAVYYCAREGTYYAM |
| 2A_HER2 | | DYWGQGTLVTVSSGGGGSGGGGSGGGGSDVVMTQTPLSLSV |
| Protein | | TPGQPASISCRSSQSIVHSNGNTYLEWYLQKPGQSPQLLIYKVS |
| Sequence | | NRFSGVPDRFSGSGSGTDFTLKISRVEAEDVGVYYCFQGSHVP |
| (VR515) | | RTFGGGTKVEIKGPTSTSGPEDQPLTPTGSDPQSGLGRHLGVVI |
| | | GILVAVILLLLLLLLLFLILRHRRQGKHWTSTQRKADFQHPAG |
| | | AVGPEPTDRGLQWRSSPAADAQEENLYAAVKHTQPEDGVEM |
| | | DTRSPHDEDPQAVTYAEVKHSRPRREMASPPSPLSGEFLDTKD |
| | | RQAEEDRQMDTEAAASEAPQDVTYAQLHSLTLRREATEPPPS |
| | | QEGPSPAVPSIYATLAIHGSGEGRGSLLTCGDVEENPGPMALPV |
| | | TALLLPLALLLHAARPDIQMTQSPSSLSASVGDRVTITCRASQD |
| | | VNTAVAWYQQKPGKAPKLLIYSASFLYSGVPSRFSGSRSGTDF |
| | | TLTISSLQPEDFATYYCQQHYTTPPTFGQGTKVEIKGSTSGSGK |
| | | PGSGEGSTKGEVQLVESGGGLVQPGGSLRLSCAASGFNIKDTY |
| | | IHWVRQAPGKGLEWVARIYPTNGYTRYADSVKGRFTISADTS |
| | | KNTAYLQMNSLRAEDTAVYYCSRWGGDGFYAMDYWGQGTL |
| | | VTVSSTTTPAPRPPTPAPTIASQPLSLRPEACRPAAGGAVHTRG |
| | | LDFACDIYIWAPLAGTCGVLLLSLVITLYCKRGRKKLLYIFKQP |
| | | FMRPVQTTQEEDGCSCRFPEEEEGGCELRVKFSRSADAPAYQQ |
| | | GQNQLYNELNLGRREEYDVLDKRRGRDPEMGGKPRRKNPQE |
| | | GLYNELQKDKMAEAYSEIGMKGERRRGKGHDGLYQGLSTAT |
| | | KDTYDALHMQALPPR |
| MC0516- | SEQ ID | ATGGCGCTGCCAGTCACTGCATTGTTATTGCCTCTGGCCCTG |
| SN66E3.2 | NO: 323 | CTTCTCCATGCGGCAAGGCCAGATATAGTGATGACACAGTC |
| (LH)_LIR1 | | CCCCGACTCCCTGGCTGTCTCACTGGGAGAACGAGCGACGA |
| (30)_2A_HER2 | | TTAGTTGTAAGTCTAGCCAGAGCGTCCTGTATTCAAGCAAT |
| Nucleotide | | AACAAGAATTACCTCGCCTGGTATCAGCAAAAGCCGGGACA |
| Sequence | | GCCACCCAAACTGTTGATTTACTGGGCCAGCACGAGAGAGA |
| (VR516) | | GCGGAGTGCCCGACCGCTTCAGCGGATCCGGGTCAGGCACA |
| | | GATTTTACCCTGACTATTAGCTCCCTTCAAGCGGAAGATGTC |
| | | GCCGTCTACTATTGCCAGCAATATTACGGAACTCCATTCAC |
| | | ATTCGGCGGTGGGACCAAAGTAGAGATAAAGGGTGGCGGG |
| | | GGATCCGGCGGTGGCGGTAGCGGGGGAGGCGGGTCCCAAG |
| | | TGCAACTAGTCCAATCAGGTGCCGAAGTCAAGAAACCAGGT |
| | | GCATCCGTGAAAGTGTCTTGCAAAGCCAGTGGCTACACTTT |
| | | TACTGACTACTATCTGCACTGGGTGCGTCAAGCACCCGGCC |
| | | AGGGGCTTGAATGGATGGGCTGGATTAACCCTTATACTGGA |
| | | GGGACAAATTACGCTCAGAAGTTCCAGGGACGCGTTACAAT |
| | | GACCCGAGACACCAGCATCAGCACAGCGTACATGGAGTTA |
| | | AGTGGGCTGACTTCCGACGATACCGCCGTGTATTACTGCGC |
| | | TCGGGCAGGGGCCTCTTACTATGATTTTTGGTCCGGTTGGGT |
| | | CTTCGATTACTGGGGGCAGGGAACCCTGGTGACAGTGTCCT |
| | | CAGGCCCCACTTCTACCAGTGGACCGGAAGATCAACCACTT |
| | | ACACCAACGGGCAGCGACCCCCAGTCAGGCCTAGGGCGCC |
| | | ACCTGGGTGTGGTCATCGGGATACTGGTCGCTGTCATCCTG |
| | | CTTCTGCTCCTTCTCTTGCTCCTATTCCTAATCCTGCGCCACA |
| | | GGAGACAGGGCAAGCACTGGACCAGCACCCAGCGGAAGGC |
| | | CGACTTTCAGCACCCTGCCGGCGCCGTGGGCCCTGAGCCTA |
| | | CCGACAGGGGCCTGCAGTGGAGGAGCTCCCCAGCCGCCGAT |
| | | GCCCAGGAGGAGAATCTGTACGCCGCCGTGAAGCACACCC |
| | | AGCCAGAGGACGGCGTGGAGATGGACACCCGCTCCCCACA |
| | | CGACGAGGACCCACAGGCCGTGACCTACGCCGAGGTGAAG |
| | | CACAGCCGCCCCAGACGCGAGATGGCCAGCCCACCCAGCCC |
| | | CCTGTCCGGCGAGTTCCTGGACACCAAGGACAGGCAGGCCG |
| | | AGGAGGACCGGCAGATGGACACCGAGGCCGCCGCCTCCGA |
| | | GGCCCCCCAGGACGTGACCTACGCCCAGCTGCACTCCCTGA |
| | | CCCTGCGGAGAGAGGCCACCGAGCCCCCACCCAGCCAGGA |
| | | GGGCCCCTCCCCCGCCGTGCCTAGCATCTACGCCACCCTGG |
| | | CCATCCACGGATCCGGGGAAGGCCGAGGCTCCCTTCTAACA |
| | | TGTGGAGATGTCGAGGAAAACCCTGGCCCTATGGCGCTGCC |
| | | AGTCACTGCATTGTTATTGCCTCTGGCCCTGCTTCTCCATGC |
| | | GGCGCGCCCAGACATCCAGATGACCCAATCCCCAAGCAGTC |
| | | TCTCAGCCAGCGTGGGAGACAGGGTTACAATCACGTGCCGC |
| | | GCCAGCCAGGACGTCAACACCGCTGTGGCTTGGTATCAGCA |
| | | AAAGCCCGGGAAGGCACCAAAGCTGCTTATTTATAGCGCCT |
| | | CCTTCTTGTATTCTGGAGTGCCATCCAGGTTTTCCGGGTCAC |
| | | GTAGCGGGACTGACTTTACCCTCACCATATCCAGCCTCCAG |
| | | CCCGAGGATTTCGCCACCTATTACTGTCAGCAACACTACAC |
| | | GACTCCACCGACTTTTGGACAGGGCACTAAAGTGGAGATTA |
| | | AGGGCAGCACGAGTGGGAGTGGAAAGCCCGGCAGCGGGGA |
| | | GGGGTCTACCAAGGGAGAGGTCCAGCTGGTTGAATCCGGA |
| | | GGCGGGCTTGTGCAACCTGGAGGCTCCCTGAGGCTTAGTTG |
| | | TGCCGCGTCAGGATTCAACATTAAGGATACCTATATTCATT |
| | | GGGTCCGACAAGCCCCGGGCAAGGGCTTGGAGTGGGTGGC |
| | | CAGAATCTATCCGACCAACGGATATACAAGGTACGCCGATT |
| | | CTGTGAAAGGACGCTTCACCATCAGCGCGGACACATCCAAA |
| | | AACACAGCCTATCTGCAGATGAACTCCCTTCGCGCCGAGGA |
| | | TACAGCCGTGTACTATTGTAGTCGGTGGGGAGGCGACGGCT |
| | | TCTACGCGATGGACTATTGGGGACAAGGAACACTGGTGACT |
| | | GTCAGTAGCACTACGACCCCAGCACCTAGACCTCCCACCCC |
| | | AGCTCCAACTATAGCTTCCCAGCCATTGTCTCTCCGGCCAGA |
| | | GGCGTGTCGACCAGCCGCTGGAGGGGCCGTTCATACAAGAG |
| | | GACTCGATTTCGCTTGCGATATCTACATATGGGCCCCTCTTG |
| | | CCGGGACATGCGGTGTCCTGCTTCTAAGCTTGGTTATTACCC |
| | | TCTATTGCAAAAGAGGACGAAAGAAACTGCTTTATATATTC |
| | | AAGCAACCTTTCATGCGCCCCGTACAGACCACGCAGGAGGA |
| | | AGATGGGTGTAGCTGTCGCTTCCCTGAGGAAGAGGAAGGTG |
| | | GATGCGAGTTGCGGGTGAAGTTCAGTCGATCCGCCGATGCG |
| | | CCTGCCTATCAGCAAGGGCAGAACCAGCTTTATAACGAGTT |
| | | AAACCTTGGCCGCCGGGAAGAGTATGACGTGTTGGACAAGC |
| | | GTCGCGGGAGAGACCCTGAGATGGGCGGAAAACCAAGGAG |
| | | AAAAAATCCACAGGAAGGCTTATATAACGAGTTGCAGAAA |
| | | GACAAGATGGCCGAGGCATACTCCGAAATCGGAATGAAGG |
| | | GCGAGCGACGGCGCGGCAAAGGCCACGATGGACTCTATCA |
| | | GGGCTTAAGCACCGCCACCAAAGACACCTACGATGCACTTC |
| | | ATATGCAGGCACTCCCACCTAGATGATAA |
| MC0516- | SEQ ID | MALPVTALLLPLALLLHAARPDIVMTQSPDSLAVSLGERATISC |
| SN66E3.2 | NO: 324 | KSSQSVLYSSNNKNYLAWYQQKPGQPPKLLIYWASTRESGVP |
| (LH)_LIR1 | | DRFSGSGSGTDFTLTISSLQAEDVAVYYCQQYYGTPFTFGGGT |
| (30)_2A_HER2 | | KVEIKGGGGSGGGGSGGGGSQVQLVQSGAEVKKPGASVKVS |
| Protein | | CKASGYTFTDYYLHWVRQAPGQGLEWMGWINPYTGGTNYA |
| Sequence | | QKFQGRVTMTRDTSISTAYMELSGLTSDDTAVYYCARAGASY |
| (VR516) | | YDFWSGWVFDYWGQGTLVTVSSGPTSTSGPEDQPLTPTGSDP |
| | | QSGLGRHLGVVIGILVAVILLLLLLLLLFLILRHRRQGKHWTST |
| | | QRKADFQHPAGAVGPEPTDRGLQWRSSPAADAQEENLYAAV |
| | | KHTQPEDGVEMDTRSPHDEDPQAVTYAEVKHSRPRREMASPP |
| | | SPLSGEFLDTKDRQAEEDRQMDTEAAASEAPQDVTYAQLHSL |
| | | TLRREATEPPPSQEGPSPAVPSIYATLAIHGSGEGRGSLLTCGDV |
| | | EENPGPMALPVTALLLPLALLLHAARPDIQMTQSPSSLSASVG |
| | | DRVTITCRASQDVNTAVAWYQQKPGKAPKLLIYSASFLYSGVP |
| | | SRESGSRSGTDFTLTISSLQPEDFATYYCQQHYTTPPTFGQGTK |
| | | VEIKGSTSGSGKPGSGEGSTKGEVQLVESGGGLVQPGGSLRLS |
| | | CAASGFNIKDTYIHWVRQAPGKGLEWVARIYPTNGYTRYADS |
| | | VKGRFTISADTSKNTAYLQMNSLRAEDTAVYYCSRWGGDGFY |
| | | AMDYWGQGTLVTVSSTTTPAPRPPTPAPTIASQPLSLRPEACRP |
| | | AAGGAVHTRGLDFACDIYIWAPLAGTCGVLLLSLVITLYCKRG |
| | | RKKLLYIFKQPFMRPVQTTQEEDGCSCRFPEEEEGGCELRVKFS |
| | | RSADAPAYQQGQNQLYNELNLGRREEYDVLDKRRGRDPEMG |
| | | GKPRRKNPQEGLYNELQKDKMAEAYSEIGMKGERRRGKGHD |
| | | GLYQGLSTATKDTYDALHMQALPPR |
| MC0517- | SEQ ID | ATGGCGCTGCCAGTCACTGCATTGTTATTGCCTCTGGCCCTG |
| SN66E3.3_ | NO: 325 | CTTCTCCATGCGGCAAGGCCAGATATAGTGATGACACAGTC |
| (LH)_LIRI | | CCCCGACTCCCTGGCTGTCTCACTGGGAGAACGAGCGACGA |
| (26)_2A_HER2 | | TTAGTTGTAAGTCTAGCCAGAGCGTCCTGTATTCAAGCAAT |
| Nuclotide | | AACAAGAATTACCTCGCCTGGTATCAGCAAAAGCCGGGACA |
| Sequence | | GCCACCCAAACTGTTGATTTACTGGGCCAGCACGAGAGAGA |
| (VR517) | | GCGGAGTGCCCGACCGCTTCAGCGGATCCGGGTCAGGCACA |
| | | GATTTTACCCTGACTATTAGCTCCCTTCAAGCGGAAGATGTC |
| | | GCCGTCTACTATTGCCAGCAATATTACGGAACTCCATTCAC |
| | | ATTCGGCGGTGGGACCAAAGTAGAGATAAAGGGTGGCGGG |
| | | GGATCCGGCGGTGGCGGTAGCGGGGGAGGCGGGTCCCAAG |
| | | TGCAACTAGTCCAATCAGGTGCCGAAGTCAAGAAACCAGGT |
| | | GCATCCGTGAAAGTGTCTTGCAAAGCCAGTGGCTACACTTT |
| | | TACTGACTACTATCTGCACTGGGTGCGTCAAGCACCCGGCC |
| | | AGGGGCTTGAATGGATGGGCTGGATTAACCCTTATACTGGA |
| | | GGGACAAATTACGCTCAGAAGTTCCAGGGACGCGTTACAAT |
| | | GACCCGAGACACCAGCATCAGCACAGCGTACATGGAGTTA |
| | | AGTAGGCTGAGGTCCGAAGATACCGCCGTGTATTACTGCGC |
| | | TCGGGCAGGGGCCTCTTACTATGATTTTTGGTCCGGTTGGGT |
| | | CTTCGATTACTGGGGGCAGGGAACCCTGGTGACAGTGTCCT |
| | | CAACCAGTGGACCGGAAGATCAACCACTTACACCAACGGG |
| | | CAGCGACCCCCAGTCAGGCCTAGGGCGCCACCTGGGTGTGG |
| | | TCATCGGGATACTGGTCGCTGTCATCCTGCTTCTGCTCCTTC |
| | | TCTTGCTCCTATTCCTAATCCTGCGCCACAGGAGACAGGGC |
| | | AAGCACTGGACCAGCACCCAGCGGAAGGCCGACTTTCAGC |
| | | ACCCTGCCGGCGCCGTGGGCCCTGAGCCTACCGACAGGGGC |
| | | CTGCAGTGGAGGAGCTCCCCAGCCGCCGATGCCCAGGAGG |
| | | AGAATCTGTACGCCGCCGTGAAGCACACCCAGCCAGAGGA |
| | | CGGCGTGGAGATGGACACCCGCTCCCCACACGACGAGGAC |
| | | CCACAGGCCGTGACCTACGCCGAGGTGAAGCACAGCCGCCC |
| | | CAGACGCGAGATGGCCAGCCCACCCAGCCCCCTGTCCGGCG |
| | | AGTTCCTGGACACCAAGGACAGGCAGGCCGAGGAGGACCG |
| | | GCAGATGGACACCGAGGCCGCCGCCTCCGAGGCCCCCCAG |
| | | GACGTGACCTACGCCCAGCTGCACTCCCTGACCCTGCGGAG |
| | | AGAGGCCACCGAGCCCCCACCCAGCCAGGAGGGCCCCTCCC |
| | | CCGCCGTGCCTAGCATCTACGCCACCCTGGCCATCCACGGA |
| | | TCCGGGGAAGGCCGAGGCTCCCTTCTAACATGTGGAGATGT |
| | | CGAGGAAAACCCTGGCCCTATGGCGCTGCCAGTCACTGCAT |
| | | TGTTATTGCCTCTGGCCCTGCTTCTCCATGCGGCGCGCCCAG |
| | | ACATCCAGATGACCCAATCCCCAAGCAGTCTCTCAGCCAGC |
| | | GTGGGAGACAGGGTTACAATCACGTGCCGCGCCAGCCAGG |
| | | ACGTCAACACCGCTGTGGCTTGGTATCAGCAAAAGCCCGGG |
| | | AAGGCACCAAAGCTGCTTATTTATAGCGCCTCCTTCTTGTAT |
| | | TCTGGAGTGCCATCCAGGTTTTCCGGGTCACGTAGCGGGAC |
| | | TGACTTTACCCTCACCATATCCAGCCTCCAGCCCGAGGATTT |
| | | CGCCACCTATTACTGTCAGCAACACTACACGACTCCACCGA |
| | | CTTTTGGACAGGGCACTAAAGTGGAGATTAAGGGCAGCACG |
| | | AGTGGGAGTGGAAAGCCCGGCAGCGGGGAGGGGTCTACCA |
| | | AGGGAGAGGTCCAGCTGGTTGAATCCGGAGGCGGGCTTGTG |
| | | CAACCTGGAGGCTCCCTGAGGCTTAGTTGTGCCGCGTCAGG |
| | | ATTCAACATTAAGGATACCTATATTCATTGGGTCCGACAAG |
| | | CCCCGGGCAAGGGCTTGGAGTGGGTGGCCAGAATCTATCCG |
| | | ACCAACGGATATACAAGGTACGCCGATTCTGTGAAAGGACG |
| | | CTTCACCATCAGCGCGGACACATCCAAAAACACAGCCTATC |
| | | TGCAGATGAACTCCCTTCGCGCCGAGGATACAGCCGTGTAC |
| | | TATTGTAGTCGGTGGGGAGGCGACGGCTTCTACGCGATGGA |
| | | CTATTGGGGACAAGGAACACTGGTGACTGTCAGTAGCACTA |
| | | CGACCCCAGCACCTAGACCTCCCACCCCAGCTCCAACTATA |
| | | GCTTCCCAGCCATTGTCTCTCCGGCCAGAGGCGTGTCGACC |
| | | AGCCGCTGGAGGGGCCGTTCATACAAGAGGACTCGATTTCG |
| | | CTTGCGATATCTACATATGGGCCCCTCTTGCCGGGACATGC |
| | | GGTGTCCTGCTTCTAAGCTTGGTTATTACCCTCTATTGCAAA |
| | | AGAGGACGAAAGAAACTGCTTTATATATTCAAGCAACCTTT |
| | | CATGCGCCCCGTACAGACCACGCAGGAGGAAGATGGGTGT |
| | | AGCTGTCGCTTCCCTGAGGAAGAGGAAGGTGGATGCGAGTT |
| | | GCGGGTGAAGTTCAGTCGATCCGCCGATGCGCCTGCCTATC |
| | | AGCAAGGGCAGAACCAGCTTTATAACGAGTTAAACCTTGGC |
| | | CGCCGGGAAGAGTATGACGTGTTGGACAAGCGTCGCGGGA |
| | | GAGACCCTGAGATGGGCGGAAAACCAAGGAGAAAAAATCC |
| | | ACAGGAAGGCTTATATAACGAGTTGCAGAAAGACAAGATG |
| | | GCCGAGGCATACTCCGAAATCGGAATGAAGGGCGAGCGAC |
| | | GGCGCGGCAAAGGCCACGATGGACTCTATCAGGGCTTAAGC |
| | | ACCGCCACCAAAGACACCTACGATGCACTTCATATGCAGGC |
| | | ACTCCCACCTAGATGATAA |
| MC0517- | SEQ ID | MALPVTALLLPLALLLHAARPDIVMTQSPDSLAVSLGERATISC |
| SN66E3.3 | NO: 326 | KSSQSVLYSSNNKNYLAWYQQKPGQPPKLLIYWASTRESGVP |
| (LH)_LIR1 | | DRESGSGSGTDFTLTISSLQAEDVAVYYCQQYYGTPFTFGGGT |
| (26)_2A_HER2 | | KVEIKGGGGSGGGGSGGGGSQVQLVQSGAEVKKPGASVKVS |
| Protein | | CKASGYTFTDYYLHWVRQAPGQGLEWMGWINPYTGGTNYA |
| Sequence | | QKFQGRVTMTRDTSISTAYMELSRLRSEDTAVYYCARAGASY |
| (VR517) | | YDFWSGWVFDYWGQGTLVTVSSTSGPEDQPLTPTGSDPQSGL |
| | | GRHLGVVIGILVAVILLLLLLLLLFLILRHRRQGKHWTSTQRKA |
| | | DFQHPAGAVGPEPTDRGLQWRSSPAADAQEENLYAAVKHTQP |
| | | EDGVEMDTRSPHDEDPQAVTYAEVKHSRPRREMASPPSPLSGE |
| | | FLDTKDRQAEEDRQMDTEAAASEAPQDVTYAQLHSLTLRREA |
| | | TEPPPSQEGPSPAVPSIYATLAIHGSGEGRGSLLTCGDVEENPGP |
| | | MALPVTALLLPLALLLHAARPDIQMTQSPSSLSASVGDRVTITC |
| | | RASQDVNTAVAWYQQKPGKAPKLLIYSASFLYSGVPSRFSGSR |
| | | SGTDFTLTISSLQPEDFATYYCQQHYTTPPTFGQGTKVEIKGST |
| | | SGSGKPGSGEGSTKGEVQLVESGGGLVQPGGSLRLSCAASGEN |
| | | IKDTYIHWVRQAPGKGLEWVARIYPTNGYTRYADSVKGRFTIS |
| | | ADTSKNTAYLQMNSLRAEDTAVYYCSRWGGDGFYAMDYWG |
| | | QGTLVTVSSTTTPAPRPPTPAPTIASQPLSLRPEACRPAAGGAV |
| | | HTRGLDFACDIYIWAPLAGTCGVLLLSLVITLYCKRGRKKLLYI |
| | | FKQPFMRPVQTTQEEDGCSCRFPEEEEGGCELRVKFSRSADAP |
| | | AYQQGQNQLYNELNLGRREEYDVLDKRRGRDPEMGGKPRRK |
| | | NPQEGLYNELQKDKMAEAYSEIGMKGERRRGKGHDGLYQGL |
| | | STATKDTYDALHMQALPPR |

[0310] ii. Bicistronic iCAR Portion

[0311] In some embodiments, the bicistronic iCAR portions described below can be included as part of monocistronic iCAR constructs for use in co-transduction methods along with a described monocistronic aCAR construct.

[0312] 1. iCAR Portion: scFv Component

[0313] In some embodiments, the bicistronic construct comprises an iCAR portion comprising a single chain variable fragment (scFv) component. In some embodiments, the iCAR portion comprises a single chain variable fragment (scFv) component. In some embodiments, the scFv targets an HLA antigen. In some embodiments, the HLA antigen is selected from the group consisting of HLA-A2, HLA-A3, HLA-A, HLA-B, HLA-C, HLA-G, HLA-E, HLA-F, HLA-DPA1, HLA-DQA1, HLA-DQB1, HLA-DQB2, HLA-DRB1, and HLA-DRB5. In some embodiments, the iCAR comprises an scFv. In some embodiments, the scFv is selected from the group consisting of BB7.2, 3PF12, 3PF12/C4, 3PF12/F12, 3PF12/B11, W6/32, BBM.1, SN66E3.1, SN66E3.2, SN66E.3, Ha5C2.A2, MWB1, MWB1-mod, Hz.BB7.2VH1-69_A18VK, Hz.BB7.2VH1-69 (27,30)_A18, HzBB7.2VH1-69 (27,30,48) A18, Hz.BB7.2 VH1-69 (27,30,67)_A18, Hz.BB7.2 VH1-69 (27,30,69)_A18, Hz.BB7.2 VH1-69 (27,30,67,69)_A18, Hz.BB7.2 VH1-3_A18, Hz.BB7.2 VH1-3(48)_A18, Hz.BB7.2 VH1-3(67)_A18, Hz.BB7.2 VH1-3(69)_A18, Hz.BB7.2 VH1-3(71)_A18, Hz.BB7.2 VH1-3(73)_A18, and MWB1.2. In some embodiments, the scFv has the VL and VH sequences of BB7.2 (SEQ ID NOs: 37 and 38). In some embodiments, the scFv has the VL and VH sequences of 3PF12/C4 (SEQ ID NOs: 39 and 40). In some embodiments, the scFv has the VL and VH sequences of 3PF12/F12 (SEQ ID NOs: 41 and 42). In some embodiments, the scFv has the VL and VH sequences of 3PF12/B11 (SEQ ID NOs: 43 and 44). In some embodiments, the scFv has the VL and VH sequences of W6/32 (SEQ ID NOs: 45 and 46). In some embodiments, the scFv has the VL and VH sequences of BBM.1 (SEQ ID NOs: 47 and 48). In some embodiments, the scFv has the VL and VH sequences of SN66E3 (SEQ ID NOs: 49 and 50). In some embodiments, the scFv has the VL and VH sequences of Ha5C2.A2 (SEQ ID NOs: 51 and 52). In some embodiments, the scFv has the VL and VH sequences of MWB1 (SEQ ID NOs: 53 and 54). In some embodiments, the scFv has the VL and VH sequences of MWB1-mod (SEQ ID NOs: 55 and 56). In some embodiments, the scFv has the VL and VH sequences of Hz.BB7.2 VH1-69_A18VK (SEQ ID NOs: 57 and 58). In some embodiments, the scFv has the VL and VH sequences of Hz.BB7.2 VH1-69 (27,30)_A18 (SEQ ID NOs: 59 and 60). In some embodiments, the scFv has the VL and VH sequences of Hz.BB7.2 VH1-69 (27,30,48)_A18 (SEQ ID NOs: 61 and 62). In some embodiments, the scFv has the VL and VH sequences of Hz.BB7.2 VH1-69 (27,30,67)_A18 (SEQ ID NOs: 63 and 64). In some embodiments, the scFv has the VL and VH sequences of Hz.BB7.2 VH1-69 (27,30,69) A18 (SEQ ID NOs: 65 and 66). In some embodiments, the scFv has the VL and VH sequences of Hz.BB7.2 VH1-69 (27,30,67,69)_A18 (SEQ ID NOs: 67 and 68). In some embodiments, the scFv has the VL and VH sequences of Hz.BB7.2 VH1-3_A18 (SEQ ID NOs: 69 and 70). In some embodiments, the scFv has the VL and VH sequences of Hz.BB7.2 VH1-3(48)_A18 (SEQ ID NOs: 71 and 72). In some embodiments, the scFv has the VL and VH sequences of Hz.BB7.2 VH1-3(67)_A18 (SEQ ID NOs: 73 and 74). In some embodiments, the scFv has the VL and VH sequences of Hz.BB7.2 VH1-3(69)_A18 (SEQ ID NOs: 75 and 76). In some embodiments, the scFv has the VL and VH sequences of Hz.BB7.2 VH1-3(71)_A18 (SEQ ID NOs: 77 and 78). In some embodiments, the scFv has the VL and VH sequences of Hz.BB7.2 VH1-3(73)_A18 (SEQ ID NOs: 79 and 80). In some embodiments, the scFv has the VL and VH sequences of MWB1.2 (SEQ ID NOs: 163 and 164). In some embodiments, the scFv has the VL and VH sequences of SN66E3.2 (SEQ ID NOs: 165 and 166). In some embodiments, the scFv has the VL and VH sequences of SN66E3.3 (SEQ ID NOs: 283 and 284) In some embodiments, the scFv is BB7.2 (SEQ ID NO:167). In some embodiments, the scFv is 3PF12 (SEQ ID NO:168). In some embodiments, the scFv is SN66E3.1 (SEQ ID NO:169). In some embodiments, the scFv is SN66E3.2 (SEQ ID NO:285). In some embodiments, the scFv is SN66E3.3 (SEQ ID NO:286). In some embodiments, the scFv is Hz BB7.2.1 (SEQ ID NO:287). In some embodiments, the scFv is HzBB7.2.2 (SEQ ID NO:288). In some embodiments, the scFv is MWB1.1 (SEQ ID NO:273). In some embodiments, the scFv is MWB1.2 (SEQ ID NO:274). In some embodiments, the scFv is 3PF12/C4. In some embodiments, the scFv is 3PF12/F12. In some embodiments, the scFv is 3PF12/B11. In some embodiments, the scFv is W6/32. In some embodiments, the scFv is BBM.1. In some embodiments, the scFv is Ha5C2.A2. In some embodiments, the scFv is MWB1. In some embodiments, the scFv is MWB1-mod. In some embodiments, the scFv is BB7.2. In some embodiments, the scFv is 3PF12. In some embodiments, the scFv is SN66E3.1. In some embodiments, the scFv is SN66E3.2. In some embodiments, the scFv is SN66E3.3. In some embodiments, the scFv is Hz BB7.2.1. In some embodiments, the scFv is HzBB7.2.2. In some embodiments, the scFv is MWB1.1. In some embodiments, the scFv is MWB1.2. In some embodiments, the scFv is Hz.BB7.2 VH1-69_A18VK. In some embodiments, the scFv is Hz.BB7.2 VH1-69 (27,30)_A18. In some embodiments, the scFv is Hz.BB7.2 VH1-69 (27,30,48)_A18. In some embodiments, the scFv is Hz.BB7.2 VH1-69 (27, 30, 67)_A18. In some embodiments, the scFv is Hz.BB7.2 VH1-69 (27, 30, 69)_A18. In some embodiments, the scFv is Hz.BB7.2 VH1-69 (27, 30, 67, 69)_A18. In some embodiments, the scFv is Hz.BB7.2VH1-3_A18. In some embodiments, the scFv is Hz.BB7.2 VH1-3(48)_A18. In some embodiments, the scFv is Hz.BB7.2-3(67)_A18. In some embodiments, the scFv is Hz.BB7.2 VH1-3(69)_A18. In some embodiments, the scFv is Hz.BB7.2 VH1-3(71)_A18. In some embodiments, the scFv is Hz.BB7.2 VH1-3(73)_A18. In some embodiments, the scFv is MWB1.2. In some embodiments, the scFv is SN66E3.2. In some embodiments, the scFv is MWB1.1. In some embodiments, the scFv is MWB1.2. In some embodiments, the scFv comprises Hz.BB7.2 heavy chain Hz.BB7.2VH1-69. In some embodiments, the scFv comprises Hz.BB7.2 Heavy chain Hz.BB7.2VH1-69 (H27Y, H30S. In some embodiments, the scFv comprises Hz.BB7.2 heavy chain HZ.BB7.2VH1-69 (H27Y, H30S, H48I). In some embodiments, the scFv comprises Hz.BB7.2 Heavy chain Hz.BB7.2VH1-69 (H27Y, H30S, H67T). In some embodiments, the scFv comprises Hz. BB7.2 Heavy chain Hz.BB7.2VH1-69 (H27Y, H30S, H69L). In some embodiments, the scFv comprises Hz.BB7.2 Heavy Chain HZ.BB7.2VH1-69 (H27Y, H30S, VH67T, H69L). In some embodiments, the scFv comprises Hz.BB7.2 Heavy Chain Hz.BB7.2 VH1-3. In some embodiments, the scFv comprises Hz.BB7.2 Heavy Chain Hz.BB7.2 VH1-3 (H48I). In some embodiments, the scFv comprises Hz.BB7.2 Heavy Chain VH1-3 (H67T). In some embodiments, the scFv comprises Hz.BB7.2 Heavy Chain Hz.BB7.2 VH1-3 (H69L). In some embodiments, the scFv comprises Hz.BB7.2 Heavy Chain Hz.BB7.2 VH1-3 (H71A). In some embodiments, the scFv comprises Hz.BB7.2 Heavy Chain Hz.BB7.2 VH1-3 (H73A). In some embodiments, the scFv comprises Hz.BB7.2 Light chain VKA18. The 6 CDR sequences for the variable heavy and variable light chains are shown in bold and underline in Table 2 for each sequence, also referred to as vhCDR1, vhCDR2, vhCDR3, vlCDR1, vlCDR2, and vlCDR3. In some embodiments, the iCAR comprises the 6 CDR sequences for the variable heavy and variable light chains as show in bold and underline in Table 2 for each sequence, also referred to as vhCDR1, vhCDR2, vhCDR3, vlCDR1, vlCDR2, and vlCDR3. In some embodiments, the iCAR comprises the 6 CDR sequences for the variable heavy and variable light chains as show in bold and underline in Table 2 for each sequence, also referred to as vhCDR1, vhCDR2, vhCDR3, vlCDR1, vlCDR2, and vlCDR3, wherein each CDR individually optionally comprises one more substitutions. In some embodiments, the iCAR comprises the 6 CDR sequences for the variable heavy and variable light chains as show in bold and underline in Table 2 for each sequence, also referred to as vhCDR1, vhCDR2, vhCDR3, vlCDR1, vlCDR2, and vlCDR3, wherein each CDR individually optionally comprises 1, 2, and/or 3 substitutions. In some embodiments, the iCAR comprises the 6 CDR sequences for the variable heavy and variable light chains as show in bold and underline in Table 2 for each sequence, also referred to as vhCDR1, vhCDR2, vhCDR3, vlCDR1, vlCDR2, and vlCDR3, wherein each CDR individually comprises one more substitutions. In some embodiments, the iCAR comprises the 6 CDR sequences for the variable heavy and variable light chains as show in bold and underline in Table 2 for each sequence, also referred to as vhCDR1, vhCDR2, vhCDR3, vlCDR1, vlCDR2, and vlCDR3, wherein each CDR individually comprises 1, 2, and/or 3 substitutions.

TABLE 2
iCAR vh, vl, and scFv sequences

| Sequence | SEQ | |
|---|---|---|
| Information | ID NO | Amino acid sequence |
| BB7.2 variable | 37 | DVLMTQTPLSLPVSLGDQVSISCRSSQSIVHSNGNTYLEWY |
| light chain | | LQKPGQSPKLLIYKVSNRFSGVPDRFSGSGSGTDFTLKISRV |
| | | EAEDLGVYYCFQGSHVPRTFGGGTKLEIK |
| BB7.2 variable | 38 | QVQLQQSGPELVKPGASVKMSCKASGYTFTSYHIQWVKQR |
| heavy chain | | PGQGLEWIGWIYPGDGSTQYNEKFKGKTTLTADKSSSTAY |
| | | MLLSSLTSEDSAIYFCAREGTYYAMDYWGQGTSVTVSS |
| 3PF12/C4 | 39 | DIVMTQSPSFLSASVGDRVTITCRASHGINNYLAWYQQKPG |
| variable light | | KAPKLLIYAASTLQSGVPSRFSGSGSGTEFTLTISSLQPEDFA |
| chain | | TYYCQQYDSYPPTFGRGTKVEIK |
| 3PF12/C4 | 40 | QVQLVQSGGGVVQPGGSLRVSCAASGVTLSDYGMHWVRQ |
| variable heavy | | APGKGLEWMAFIRNDGSDKYYADSVKGRFTISRDNSKKTV |
| chain | | SLQMSSLRAEDTAVYYCAKNGESGPLDYWYFDLWGRGTL |
| | | VTVSS |
| 3PF12/F12 | 41 | DVVMTQSPSSLSASVGDRVTITCQASQDISNYLNWYQQKP |
| variable light | | GKAPKLLIYDASNLETGVPSRFSGSGSGTDFTFTISSLQPEDF |
| chain | | ATYYCQQYSSFPLTFGGGTKVDIK |
| 3PF12/F12 | 42 | QVQLVQSGGGVVQPGGSLRVSCAASGVTLSDYGMHWVRQ |
| variable heavy | | APGKGLEWMAFIRNDGSDKYYADSVKGRFTISRDNSKKTV |
| chain | | SLQMSSLRAEDTAVYYCAKNGESGPLDYWYFDLWGRGTL |
| | | VTVSS |
| 3PF12/B11 | 43 | DVVMTQSPSSLSASVGDRVTITCQASQDISNYLNWYQQKP |
| variable light | | GKAPKLLIYDASNLETGVPSRFSGSGSGTDFTFTISSLQPEDI |
| chain | | ATYYCQQYDNLPPTFGGGTKLEIV |
| 3PF12/B11 | 44 | QVQLVQSGGGVVQPGGSLRVSCAASGVTLSDYGMHWVRQ |
| variable heavy | | APGKGLEWMAFIRNDGSDKYYADSVKGRFTISRDNSKKTV |
| chain | | SLQMSSLRAEDTAVYYCAKNGESGPLDYWYFDLWGRGTL |
| | | VTVSS |
| W6/32 variable | 45 | SIVMTQTPKFLLVSAGDRVTITCKASQSVSNDVAWYQQKP |
| light chain | | GQSPKLLIYYASNRYTGVPDRFTGSGYGTDFTFTISTVQAED |
| | | LAVYFCQQDYSSPPWTFGGGTKLEIR |
| W6/32 variable | 46 | QVQLKQSGPGLVQPSQSLSLTCTVSGFSLTSYGVHWVRQPP |
| heavy chain | | GKGLEWLGVIWSGGSTDYNAAFISRLSIRKDNSKSQVFFK |
| | | MNSLQADDTAIYYCARTFTTSTSAWFAYWGQGTLVTVSA |
| BBM.1 variable | 47 | DIQMTQSPASQSASLGESVTITCLASQTIGTWLAWYQQKPG |
| light chain | | KSPQLLIYAATSLADGVPSRFSGSGSGTKFSLKIRTLQAEDF |
| | | VSYYCQQLYSKPYTFGGGTKLEIK |
| BBM.1 variable | 48 | EVQLQQSGAELVKPGASVKLSCTPSGFNVKDTYIHWVKQR |
| heavy chain | | PKQGLEWIGRIDPSDGDIKYDPKFQGKATITADTSSNTVSL |
| | | QLSSLTSEDTAVYYCARWFGDYGAMNYWGQGTSVTVSS |
| SN66E3.1 | 49 | DIVMTQSPDSLAVSLGERATISCKSSQSVLYSSNNKNYLAW |
| variable light | | YQQKLGQPPKLLIYWASTRESGVPDRESGSGSGTNFTLTISS |
| chain | | LQAENVAVYYCQQYYGTPFTFGGGTKVEIK |
| SN66E3.1 | 50 | QVQLVQSGAEVKKPGASVKVSCKASGYTFTDYYLHWVRQ |
| variable heavy | | APGQGLEWMGWINPYTGGTNYAQKFQGRVTMTRDASIST |
| chain | | VYMELSGLTSDDTAVHFCARAGASYYDFWSGWVFDYWG |
| | | QGTLVTVSS |
| Ha5C2.A2 | 51 | DIQMTQSPSSLSASVGDRVTITCRASQSISTYLNWYQQKPG |
| variable light | | KAPKLLIYAASSLQSGVPSRFSGSGSGTDFTLTISSLQPEDFA |
| chain | | TYQCQQSYSTPFTFGGGTKVEIK |
| Ha5C2.A2 | 52 | QVQLQESGPGLVKPSETLSLTCTVSGGSISSYYWSWIRQPAG |
| variable heavy | | KGLEWIGRIYISGGTNYNPSLKSRVTMSVDTSKNQVSLKLS |
| chain | | SVTAADTAVYYCARDILGGVSGWSHYGMDVWGQGTTVT |
| | | VSS |
| MWB1 variable | 53 | QSALTQPPSASGSPGQSVTISCTGTSSDVGGYKYVSWYQH |
| light chain | | HPDKAPKLMIYEVNKRPSGVPDRESGSKSDNTASLTVSGLQ |
| | | AEDEADYYCSSYAGSNNWVFGGGTKLTVL |
| MWB1 variable | 54 | QVQLVESGGGVVQPGGSLRLSCAASGFTFSTYGMHWVRQ |
| heavy chain | | APGKGLEWAASVSYDGSNKYYADSGQGRFTISRDTSMNSL |
| | | YLQVNSLRDETAVYYCAIGIYGAYSFDYWGQGTLVTVSS |
| MWB1.1 | 55 | QSALTQPPSASGSPGQSVTISCTGTSSDVGGYKYVSWYQH |
| (MWB1.1) | | HPDKAPKLMIYEVNKRPSGVPDRESGSKSDNTASLTVSGLQ |
| variable light | | AEDEADYYCSSYAGSNNWVFGGGTKLTVL |
| chain | | |
| MWB1.1(MWB1.1) | 56 | QVQLVESGGGVVQPGGSLRLSCAASGFTFSTYGMHWVRQ |
| variable heavy | | APGKGLEWVASISYDGSNKYYADSGQGRFTISRDTSKNSL |
| chain | | YLQMNSLRAEDTAVYYCAIGIYGAYSFDYWGQGTLVTVSS |
| Hz.BB7.2_ | 57 | DVVMTQTPLSLSVTPGQPASISCRSSQSIVHSNGNTYLEWY |
| A18VK variable | | LQKPGQSPQLLIYKVSNRFSGVPDRESGSGSGTDFTLKISRV |
| light chain | | EAEDVGVYYCFQGSHVPRTFGGGTKVEIK |
| Hz.BB7.2 VH1-69 | 58 | QVQLVQSGAEVKKPGSSVKVSCKASGGTFSSYHIQWVRQA |
| variable heavy | | PGQGLEWMGWIYPGDGSTQYNEKFKGRVTITADKSTSTA |
| chain | | YMELSSLRSEDTAVYYCAREGTYYAMDYWGQGTLVTVSS |
| Hz.BB7.2 VH1-69 | 59 | DVVMTQTPLSLSVTPGQPASISCRSSQSIVHSNGNTYLEWY |
| (27, 30) | | LQKPGQSPQLLIYKVSNRFSGVPDRESGSGSGTDFTLKISRV |
| variable light | | EAEDVGVYYCFQGSHVPRTFGGGTKVEIK |
| chain | | |
| Hz.BB7.2 Heavy | 60 | QVQLVQSGAEVKKPGSSVKVSCKASGYTFTSYHIQWVRQA |
| chain VH1-69 | | PGQGLEWMGWIYPGDGSTQYNEKFKGRVTITADKSTSTA |
| (H27Y, H30S) | | YMELSSLRSEDTAVYYCAREGTYYAMDYWGQGTLVTVSS |
| HZ.BB7.2VH1-69 | 61 | DVVMTQTPLSLSVTPGQPASISCRSSQSIVHSNGNTYLEWY |
| (27, 30, 4)_ | | LQKPGQSPQLLIYKVSNRFSGVPDRESGSGSGTDFTLKISRV |
| A18 variable | | EAEDVGVYYCFQGSHVPRTFGGGTKVEIK |
| light chain | | |
| Hz.BB7.2 heavy | 62 | QVQLVQSGAEVKKPGSSVKVSCKASGYTFTSYHIQWVRQA |
| chain VH1-69 | | PGQGLEWIGWIYPGDGSTQYNEKFKGRVTITADKSTSTAY |
| (H27Y, H30S, | | MELSSLRSEDTAVYYCAREGTYYAMDYWGQGTLVTVSS |
| H48I)) | | |
| Hz.BB7.2 VH1-69 | 63 | DVVMTQTPLSLSVTPGQPASISCRSSQSIVHSNGNTYLEWY |
| (27, 30, 67)_A18 | | LQKPGQSPQLLIYKVSNRFSGVPDRESGSGSGTDFTLKISRV |
| variable light | | EAEDVGVYYCFQGSHVPRTFGGGTKVEIK |
| chain | | |
| Hz.BB7.2 Heavy | 64 | QVQLVQSGAEVKKPGSSVKVSCKASGYTFTSYHIQWVRQA |
| chain VH1-69 | | PGQGLEWMGWIYPGDGSTQYNEKFKGRTTITADKSTSTA |
| (H27Y, H30S, | | YMELSSLRSEDTAVYYCAREGTYYAMDYWGQGTLVTVSS |
| H67T)) | | |
| HZ.BB7.2VH1-69 | 65 | DVVMTQTPLSLSVTPGQPASISCRSSQSIVHSNGNTYLEWY |
| (27, 30, 69)_ | | LQKPGQSPQLLIYKVSNRFSGVPDRFSGSGSGTDFTLKISRV |
| A18 variable | | EAEDVGVYYCFQGSHVPRTFGGGTKVEIK |
| light chain | | |
| Hz. BB7.2 Heavy | 66 | QVQLVQSGAEVKKPGSSVKVSCKASGYTFTSYHIQWVRQA |
| chain VH1-69 | | PGQGLEWMGWIYPGDGSTQYNEKFKGRVTLTADKSTSTA |
| (H27Y, H30S, | | YMELSSLRSEDTAVYYCAREGTYYAMDYWGQGTLVTVSS |
| H69L)) | | |
| Hz.BB7.2 VH1-69 | 67 | DVVMTQTPLSLSVTPGQPASISCRSSQSIVHSNGNTYLEWY |
| (27, 30, 67, 69)_ | | LQKPGQSPQLLIYKVSNRFSGVPDRFSGSGSGTDFTLKISRV |
| A18 variable | | EAEDVGVYYCFQGSHVPRTFGGGTKVEIK |
| light chain | | |
| Hz.BB7.2 Heavy | 68 | QVQLVQSGAEVKKPGSSVKVSCKASGYTFTSYHIQWVRQA |
| Chain VH1-69 | | PGQGLEWMGWIYPGDGSTQYNEKFKGRTTLTADKSTSTA |
| (H27Y, H30S, | | YMELSSLRSEDTAVYYCAREGTYYAMDYWGQGTLVTVSS |
| VH67T, H69L)) | | |
| Hz.BB7.2VH1-3_ | 69 | DVVMTQTPLSLSVTPGQPASISCRSSQSIVHSNGNTYLEWY |
| A18 variable | | LQKPGQSPQLLIYKVSNRFSGVPDRESGSGSGTDFTLKISRV |
| light chain | | EAEDVGVYYCFQGSHVPRTFGGGTKVEIK |
| Hz.BB7.2 Heavy | 70 | QVQLVQSGAEVKKPGASVKVSCKASGYTFTSYHIQWVRQ |
| Chain VH1-3) | | APGQRLEWMGWIYPGDGSTQYNEKFKGRVTITRDTSAST |
| | | AYMELSSLRSEDTAVYYCAREGTYYAMDYWGQGTLVTVS |
| | | S |
| Hz.BB7.2VH1-3 | 71 | DVVMTQTPLSLSVTPGQPASISCRSSQSIVHSNGNTYLEWY |
| (48)_A18 | | LQKPGQSPQLLIYKVSNRFSGVPDRESGSGSGTDFTLKISRV |
| variable light | | EAEDVGVYYCFQGSHVPRTFGGGTKVEIK |
| chain | | |
| Hz.BB7.2 Heavy | 72 | QVQLVQSGAEVKKPGASVKVSCKASGYTFTSYHIQWVRQ |
| Chain VH1-3 | | APGQRLEWIGWIYPGDGSTQYNEKFKGRVTITRDTSASTA |
| (H48I)) | | YMELSSLRSEDTAVYYCAREGTYYAMDYWGQGTLVTVSS |
| Hz.BB7.2VH1-3 | 73 | DVVMTQTPLSLSVTPGQPASISCRSSQSIVHSNGNTYLEWY |
| (67)_A18 | | LQKPGQSPQLLIYKVSNRFSGVPDRFSGSGSGTDFTLKISRV |
| variable light | | EAEDVGVYYCFQGSHVPRTFGGGTKVEIK |
| chain | | |
| (Hz.BB7.2 Light | | |
| chain VKA18) | | |
| Hz.BB7.2 Heavy | 74 | QVQLVQSGAEVKKPGASVKVSCKASGYTFTSYHIQWVRQ |
| Chain VH1-3 | | APGQRLEWMGWIYPGDGSTQYNEKFKGRTTITRDTSAST |
| (H67T)) | | AYMELSSLRSEDTAVYYCAREGTYYAMDYWGQGTLVTVS |
| | | S |
| Hz.BB.2VH1-3 | 75 | DVVMTQTPLSLSVTPGQPASISCRSSQSIVHSNGNTYLEWY |
| (69)_A18 | | LQKPGQSPQLLIYKVSNRFSGVPDRFSGSGSGTDFTLKISRV |
| variable light | | EAEDVGVYYCFQGSHVPRTFGGGTKVEIK |
| chain | | |
| Hz.BB7.2 Heavy | 76 | QVQLVQSGAEVKKPGASVKVSCKASGYTFTSYHIQWVRQ |
| Chain VH1-3 | | APGQRLEWMGWIYPGDGSTQYNEKFKGRVTLTRDTSAST |
| (H69L)) | | AYMELSSLRSEDTAVYYCAREGTYYAMDYWGQGTLVTVS |
| | | S |
| Hz.BB7.2VH1-3 | 77 | DVVMTQTPLSLSVTPGQPASISCRSSQSIVHSNGNTYLEWY |
| (71)_A18 | | LQKPGQSPQLLIYKVSNRFSGVPDRFSGSGSGTDFTLKISRV |
| variable light | | EAEDVGVYYCFQGSHVPRTFGGGTKVEIK |
| chain | | |
| Hz.BB7.2 VH1-3 | 78 | QVQLVQSGAEVKKPGASVKVSCKASGYTFTSYHIQWVRQ |
| (71)_variable | | APGQRLEWMGWIYPGDGSTQYNEKFKGRVTITADTSAST |
| heavy chain | | AYMELSSLRSEDTAVYYCAREGTYYAMDYWGQGTLVTVS |
| | | S |
| Hz.BB7.2VH1-3 | 79 | DVVMTQTPLSLSVTPGQPASISCRSSQSIVHSNGNTYLEWY |
| (73)_A18 | | LQKPGQSPQLLIYKVSNRFSGVPDRESGSGSGTDFTLKISRV |
| variable light | | EAEDVGVYYCFQGSHVPRTFGGGTKVEIK |
| chain | | |
| Hz.BB7.2VH1-3 | 80 | QVQLVQSGAEVKKPGASVKVSCKASGYTFTSYHIQWVRQ |
| (73)_A18 | | APGQRLEWMGWIYPGDGSTQYNEKFKGRVTITRDKSAST |
| variable heavy | | AYMELSSLRSEDTAVYYCAREGTYYAMDYWGQGTLVTVS |
| chain | | S |
| MWB1.2 variable | 163 | QSALTQPPSASGSPGQSVTISCTGTSSDVGGYKYVSWYQQ |
| light chain | | HPGKAPKLMIYEVNKRPSGVPDRFSGSKSGNTASLTVSGLQ |
| | | AEDEADYYCSSYAGSNNWVFGGGTKLTVL |
| MWB1.2 variable | 164 | QVQLVESGGGVVQPGGSLRLSCAASGFTFSTYGMHWVRQ |
| heavy chain | | APGKGLEWVASISYDGSNKYYADSGQGRFTISRDTSKNSL |
| | | YLQMNSLRAEDTAVYYCAIGIYGAYSFDYWGQGTLVTVSS |
| SN66E3.2 | 165 | DIVMTQSPDSLAVSLGERATISCKSSQSVLYSSNNKNYLAW |
| variable light | | YQQKPGQPPKLLIYWASTRESGVPDRFSGSGSGTDFTLTISS |
| chain | | LQAEDVAVYYCQQYYGTPFTFGGGTKVEIK |
| SN66E3.2 | 166 | QVQLVQSGAEVKKPGASVKVSCKASGYTFTDYYLHWVRQ |
| variable heavy | | APGQGLEWMGWINPYTGGTNYAQKFQGRVTMTRDTSIST |
| chain | | AYMELSGLTSDDTAVYYCARAGASYYDFWSGWVFDYWG |
| | | QGTLVTVSS |
| MWB1.1 | 273 | QVQLVESGGGVVQPGGSLRLSCAASGFTFSTYGMHWVRQA |
| scFvVH_VL | | PGKGLEWVASISYDGSNKYYADSGQGRFTISRDTSKNSLYL |
| | | QMNSLRAEDTAVYYCAIGIYGAYSFDYWGQGTLVTVSSGG |
| | | GGSGGGGSGGGGSQSALTQPPSASGSPGQSVTISCTGTSSDV |
| | | GGYKYVSWYQHHPDKAPKLMIYEVNKRPSGVPDRESGSKS |
| | | DNTASLTVSGLQAEDEADYYCSSYAGSNNWVFGGGTKLTV |
| | | L |
| MWB1.2scFvVH_ | 274 | QVQLVESGGGVVQPGGSLRLSCAASGFTFSTYGMHWVRQ |
| VL | | APGKGLEWVASISYDGSNKYYADSGQGRFTISRDTSKNSL |
| | | YLQMNSLRAEDTAVYYCAIGIYGAYSFDYWGQGTLVTVSS |
| | | GGGGSGGGGSGGGGSQSALTQPPSASGSPGQSVTISCTGTSS |
| | | DVGGYKYVSWYQQHPGKAPKLMIYEVNKRPSGVPDRFSG |
| | | SKSGNTASLTVSGLQAEDEADYYCSSYAGSNNWVFGGGTK |
| | | LTVL |
| SN66E3.3 | 283 | DIVMTQSPDSLAVSLGERATISCKSSQSVLYSSNNKNYLAW |
| Variable Light | | YQQKPGQPPKLLIYWASTRESGVPDRFSGSGSGTDFTLTISS |
| chain | | LQAEDVAVYYCQQYYGTPFTFGGGTKVEIK |
| SN66E3.3 | 284 | QVQLVQSGAEVKKPGASVKVSCKASGYTFTDYYLHWVRQ |
| variable Heavy | | APGQGLEWMGWINPYTGGTNYAQKFQGRVTMTRDTSIST |
| chain | | AYMELSRLRSEDTAVYYCARAGASYYDFWSGWVFDYWG |
| | | QGTLVTVSS |

[0314] In some embodiments, the orientation of the iCAR VH and VL regions is VH-VL. In some embodiments, the orientation of the iCAR VH and VL regions is VL-VH.

[0315] In some embodiments, the iCAR scFv comprises a linker that covalently connects the VH and the VL to form the iCAR scFv.

[0316] In some embodiments, the heavy and light chains of the scFv are covalently connected via a linker. In some embodiments, the linker is a gly-ser polypeptide linker, i.e., a peptide that consists of glycine and serine residues. Exemplary gly-ser polypeptide linkers comprise the amino acid sequence Ser(Gly₄Ser)ₙ, as well as (Gly₄Ser)ₙ and/or (Gly₄Ser 3)ₙ. In some embodiments, n=1. In some embodiments, n=2. In some embodiments, n=3, i.e., Ser(Gly₄Ser) 3. In some embodiments, n=4, i.e., Ser(Gly₄Ser) 4. In some embodiments, n=5. In some embodiments, n=6. In some embodiments, n=7. In some embodiments, n=8. In some embodiments, n=9. In some embodiments, n=10. Another exemplary gly-ser polypeptide linker comprises the amino acid sequence Ser(Gly₄Ser)ₙ. In some embodiments, n=1. In some embodiments, n=2. In some embodiments, n=3. In another embodiment, n=4. In some embodiments, n=5. In some embodiments, n=6. Another exemplary gly-ser polypeptide linker comprises (Gly₄Ser)ₙ. In some embodiments, n=1. In some embodiments, n=2. In some embodiments, n=3. In some embodiments, n=4. In some embodiments, n=5. In some embodiments, n=6. Another exemplary gly-ser polypeptide linker comprises (Gly 3 Ser)ₙ. In some embodiments, n=1. In some embodiments, n=2. In some embodiments, n=3. In some embodiments, n=4. In another embodiment, n=5. In yet another embodiment, n=6. Another exemplary gly-ser polypeptide linker comprises (Gly₄Ser 3)ₙ. In some embodiments, n=1. In some embodiments, n=2. In some embodiments, n=3. In some embodiments, n=4. In some embodiments, n=5. In some embodiments, n=6. Another exemplary gly-ser polypeptide linker comprises (Gly 3 Ser)ₙ. In some embodiments, n=1. In some embodiments, n=2. In some embodiments, n=3. In some embodiments, n=4. In another embodiment, n=5. In yet another embodiment, n=6.

[0317] In some embodiments, the iCAR comprises a GS based linker sequence, connecting the VH and VL or the VL and VH to form the scFv. In some embodiments, the GS linker comprises GGGGS (SEQ ID NO:153). In some embodiments, the iCAR comprises a Whitlow linker sequence, e.g., GSTSGSGKPGSGEGSTKG (SEQ ID NO:82). In some embodiments, the iCAR comprises the Vh and Vl sequences in the Vh-Vl orientation. In some embodiments, the iCAR comprises the Vh and Vl sequences in the Vl-Vh orientation. In some embodiments, the iCAR comprises a linker between the Vh and Vl sequences. In some embodiments, the iCAR does not comprise a linker between the Vh and Vl sequences.

TABLE 3
iCAR linkers

| Sequence | SEQ ID | |
|---|---|---|
| Information | NO | Amino acid sequence |
| (G4S)X3 linker | 81 | GGGGSGGGGSGGGGS |
| Whitlow linker | 82 | GSTSGSGKPGSGEGSTKG |
| PD1 linker | 83 | DFQWREKTPEPPVPCVPEQ |
| G4S | 153 | GGGGS |

[0318] In some embodiments, the iCAR scFv comprises a linker. In some embodiments, the iCAR scFv is selected from the group consisting of BB7.2 scFv (SEQ ID NO: 167), 3PF12 scFv (SEQ ID NO: 168), SN66E3.1 scFv (SEQ ID NO: 169), SN66E3.2 scFv (SEQ ID NO: 285), SN66E3.3 scFv (SEQ ID NO: 286), Hz BB7.2.1 scFv (SEQ ID NO: 287), and Hz BB7.2.2 scFv (SEQ ID NO: 288). In some embodiments, the iCAR scFv is BB7.2 scFv (SEQ ID NO: 167). In some embodiments, the iCAR scFv is 3PF12 scFv (SEQ ID NO: 168). In some embodiments, the iCAR scFv is SN66E3.1 scFv (SEQ ID NO: 169). In some embodiments, the iCAR scFv is SN66E3.2 scFv (SEQ ID NO: 285). In some embodiments, the iCAR scFv is SN66E3.3 scFv (SEQ ID NO: 286). In some embodiments, the iCAR scFv is Hz BB7.2.1 scFv (SEQ ID NO: 287). In some embodiments, the iCAR scFv is Hz BB7.2.2 scFv (SEQ ID NO: 288).

TABLE 4
iCAR scFv sequences with linkers

| Sequence | SEQ | |
|---|---|---|
| Information | ID NO | Amino acid sequence |
| BB7.2 scFv | 167 | QVQLQQSGPELVKPGASVKMSCKASGYTFTSYHIQWVKQ |
| | | RPGQGLEWIGWIYPGDGSTQYNEKFKGKTTLTADKSSSTA |
| | | YMLLSSLTSEDSAIYFCAREGTYYAMDYWGQGTSVTVSS |
| | | GGGGSGGGGSGGGGSDVLMTQTPLSLPVSLGDQVSISCRS |
| | | SQSIVHSNGNTYLEWYLQKPGQSPKLLIYKVSNRFSGVPD |
| | | RFSGSGSGTDFTLKISRVEAEDLGVYYCFQGSHVPRTFGG |
| | | GTKLEIK |
| 3PF12 scFv | 168 | QVQLVQSGGGVVQPGGSLRVSCAASGVTLSDYGMHWVR |
| | | QAPGKGLEWMAFIRNDGSDKYYADSVKGRFTISRDNSKK |
| | | TVSLQMSSLRAEDTAVYYCAKNGESGPLDYWYFDLWGR |
| | | GTLVTVSSGGGGSGGGGSGGGGSDIVMTQSPSFLSASVGD |
| | | RVTITCRASHGINNYLAWYQQKPGKAPKLLIYAASTLQSG |
| | | VPSRFSGSGSGTEFTLTISSLQPEDFATYYCQQYDSYPPTFG |
| | | RGTKVEIK |
| SN66E3.1 scFv | 169 | QVQLVQSGAEVKKPGASVKVSCKASGYTFTDYYLHWVR |
| | | QAPGQGLEWMGWINPYTGGTNYAQKFQGRVTMTRDASIS |
| | | TVYMELSGLTSDDTAVHFCARAGASYYDFWSGWVFDYW |
| | | GQGTLVTVSSGGGGSGGGGSGGGGSDIVMTQSPDSLAVSL |
| | | GERATISCKSSQSVLYSSNNKNYLAWYQQKLGQPPKLLIY |
| | | WASTRESGVPDRFSGSGSGTNFTLTISSLQAENVAVYYCQ |
| | | QYYGTPFTFGGGTKVEIK |
| SN66E3.2 scFv | 285 | DIVMTQSPDSLAVSLGERATISCKSSQSVLYSSNNKNYLA |
| | | WYQQKPGQPPKLLIYWASTRESGVPDRESGSGSGTDFTLTI |
| | | SSLQAEDVAVYYCQQYYGTPFTFGGGTKVEIKGGGGSGG |
| | | GGSGGGGSQVQLVQSGAEVKKPGASVKVSCKASGYTFTD |
| | | YYLHWVRQAPGQGLEWMGWINPYTGGTNYAQKFQGRV |
| | | TMTRDTSISTAYMELSGLTSDDTAVYYCARAGASYYDFW |
| | | SGWVFDYWGQGTLVTVSS |
| SN66E3.3 scFv | 286 | DIVMTQSPDSLAVSLGERATISCKSSQSVLYSSNNKNYLA |
| | | WYQQKPGQPPKLLIYWASTRESGVPDRFSGSGSGTDFTLTI |
| | | SSLQAEDVAVYYCQQYYGTPFTFGGGTKVEIKGGGGSGG |
| | | GGSGGGGSQVQLVQSGAEVKKPGASVKVSCKASGYTFTD |
| | | YYLHWVRQAPGQGLEWMGWINPYTGGTNYAQKFQGRV |
| | | TMTRDTSISTAYMELSRLRSEDTAVYYCARAGASYYDFW |
| | | SGWVFDYWGQGTLVTVSS |
| Hz BB7.2.1 scFv | 287 | QVQLVQSGAEVKKPGSSVKVSCKASGYTFTSYHIQWVRQ |
| | | APGQGLEWMGWIYPGDGSTQYNEKFKGRTTITADKSTST |
| | | AYMELSSLRSEDTAVYYCAREGTYYAMDYWGQGTLVTV |
| | | SSGGGGSGGGGSGGGGSDVVMTQTPLSLSVTPGQPASISC |
| | | RSSQSIVHSNGNTYLEWYLQKPGQSPQLLIYKVSNRFSGVP |
| | | DRFSGSGSGTDFTLKISRVEAEDVGVYYCFQGSHVPRTFG |
| | | GGTKVEIK |
| HzBB7.2.2 scFV | 288 | QVQLVQSGAEVKKPGASVKVSCKASGYTFTSYHIQWVRQ |
| | | APGQRLEWIGWIYPGDGSTQYNEKFKGRVTITRDTSASTA |
| | | YMELSSLRSEDTAVYYCAREGTYYAMDYWGQGTLVTVS |
| | | SGGGGSGGGGSGGGGSDVVMTQTPLSLSVTPGQPASISCR |
| | | SSQSIVHSNGNTYLEWYLQKPGQSPQLLIYKVSNRFSGVP |
| | | DRFSGSGSGTDFTLKISRVEAEDVGVYYCFQGSHVPRTFG |
| | | GGTKVEIK |

[0319] In some embodiments, the iCAR scFv linker is a gly-ser polypeptide linker, i.e., a peptide that consists of glycine and serine residues. Exemplary gly-ser polypeptide linkers comprise the amino acid sequence Ser(Gly₄Ser)ₙ, as well as (Gly₄Ser)ₙ and/or (Gly₄Ser 3)ₙ. In some embodiments, n=1. In some embodiments, n=2. In some embodiments, n=3, i.e., Ser(Gly₄Ser) 3. In some embodiments, n=4, i.e., Ser(Gly₄Ser) 4. In some embodiments, n=5. In some embodiments, n=6. In some embodiments, n=7. In some embodiments, n=8. In some embodiments, n=9. In some embodiments, n=10. Another exemplary gly-ser polypeptide linker comprises the amino acid sequence Ser(Gly₄Ser)ₙ. In some embodiments, n=1. In some embodiments, n=2. In some embodiments, n=3. In another embodiment, n=4. In some embodiments, n=5. In some embodiments, n=6. Another exemplary gly-ser polypeptide linker comprises (Gly₄Ser)ₙ. In some embodiments, n=1. In some embodiments, n=2. In some embodiments, n=3. In some embodiments, n=4. In some embodiments, n=5. In some embodiments, n=6. Another exemplary gly-ser polypeptide linker comprises (Gly 3 Ser)ₙ. In some embodiments, n=1. In some embodiments, n=2. In some embodiments, n=3. In some embodiments, n=4. In another embodiment, n=5. In yet another embodiment, n=6. Another exemplary gly-ser polypeptide linker comprises (Gly₄Ser 3)ₙ. In some embodiments, n=1. In some embodiments, n=2. In some embodiments, n=3. In some embodiments, n=4. In some embodiments, n=5. In some embodiments, n=6. Another exemplary gly-ser polypeptide linker comprises (Gly 3 Ser)ₙ. In some embodiments, n=1. In some embodiments, n=2. In some embodiments, n=3. In some embodiments, n=4. In another embodiment, n=5. In yet another embodiment, n=6.

[0320] 2. iCAR Portion: Hinge Domain

[0321] In some embodiments, the bicistronic construct comprises an iCAR portion comprising a hinge domain component. In some embodiments, the hinge domain comprises a hinge selected from the group consisting of a PD-1 hinge domain, a CD28 hinge domain, and a CD8 hinge domain (including a CD8a hinge domain) a LIR1 Ig3-4 hinge domain, a LIR1 Ig-4 hinge domain, a LIR1 52 aa hinge domain, a LIR1 36 aa hinge domain, a LIR1 30 aa hinge domain, a LIR1 8 aa hinge domain, a CD33 hinge domain, and a KIR2DL1 hinge domain. In some embodiments, the hinge domain is a PD-1 hinge (SEQ ID NO: 86). In some embodiments, the hinge domain is a CD28 hinge domain (SEQ ID NO:85). In some embodiments, the vector comprises a CD8 hinge domain. In some embodiments, the vector comprises a CD8a hinge domain (SEQ ID NO:84). In some embodiments, the vector comprises aLIR1 Ig3-4 hinge domain (SEQ ID NO:87). In some embodiments, the vector comprises a LIR1 Ig-4 hinge domain (SEQ ID NO:88). In some embodiments, the vector comprises a LIR1 52 aa hinge domain (SEQ ID NO:89). In some embodiments, the vector comprises a LIR1 36 aa hinge domain (SEQ ID NO:90). In some embodiments, the vector comprises a LIR1 30 aa hinge domain (SEQ ID NO:91). In some embodiments, the vector comprises a LIR1 8 aa hinge domain (SEQ ID NO:92). In some embodiments, the vector comprises a CD33 hinge domain (SEQ ID NO:93). In some embodiments, the vector comprises aKIR2DL1 hinge domain (SEQ ID NO:94). In some embodiments, the iCAR comprises aLIR1 26 aa (SEQ ID NO: 289). In some embodiments, the iCAR comprises PD-1 (47) (SEQ ID NO: 290). In some embodiments, the iCAR comprises PD-1 (42) (SEQ ID NO: 291). In some embodiments, the iCAR comprises PD-1 (36) (SEQ ID NO: 292). In some embodiments, the iCAR comprises PD-1 (30) (SEQ ID NO: 293). In some embodiments, the iCAR comprises PD-1 (26) (SEQ ID NO: 294). In some embodiments, the iCAR comprises PD-1 (20) (SEQ ID NO: 295).

TABLE 5
iCAR hinge sequences

| Sequence | SEQ ID | |
|---|---|---|
| Information | NO | Amino acid sequence |
| CD8 alpha | 84 | TTTPAPRPPTPAPTIASQPLSLRPEACRPAAGGAVHTR |
| | | GLDFACD |
| CD28 | 85 | IEVMYPPPYLDNEKSNGTIIHVKGKHLCPSPLFPGPSKP |
| PD-1 | 86 | TERRAEVPTAHPSPSPRPAGQFQTLV |
| LIR1 Ig3-4 | 87 | VSKKPSLSVQPGPIVAPEETLTLQCGSDAGYNRFVLYK |
| | | DGERDFLQLAGAQPQAGLSQANFTLGPVSRSYGGQY |
| | | RCYGAHNLSSEWSAPSDPLDILIAGQFYDRVSLSVQPG |
| | | PTVASGENVTLLCQSQGWMQTFLLTKEGAADDPWRL |
| | | RSTYQSQKYQAEFPMGPVTSAHAGTYRCYGSQSSKP |
| | | YLLTHPSDPLELVVSGPSGGPSSPTTGPTSTSGPEDQPL |
| | | TPTGSDPQSGLGRHLGV |
| LIR1 Ig-4 | 88 | PLDILIAGQFYDRVSLSVQPGPTVASGENVTLLCQSQG |
| | | WMQTFLLTKEGAADDPWRLRSTYQSQKYQAEFPMG |
| | | PVTSAHAGTYRCYGSQSSKPYLLTHPSDPLELVVSGPS |
| | | GGPSSPTTGPTSTSGPEDQPLTPTGSDPQSGLGRHLGV |
| LIR1 52 aa | 89 | HPSDPLELVVSGPSGGPSSPTTGPTSTSGPEDQPLTPTG |
| | | SDPQSGLGRHLGV |
| LIR1 36 aa | 90 | PSSPTTGPTSTSGPEDQPLTPTGSDPQSGLGRHLGV |
| LIR1 30 aa | 91 | GPTSTSGPEDQPLTPTGSDPQSGLGRHLGV |
| LIR1 8 aa | 92 | GLGRHLGV |
| CD33 | 93 | LNVTYVPQNPTTGIFPGDGSGKQETRAGVVH |
| KIR2DL1 | 94 | PYEWSKSSDPLLVSVTGNPSNSWPSPTEPSSKTGNPRH |
| | | LH |
| LIR1 26 aa | 289 | TSGPEDQPLTPTGSDPQSGLGRHLGV |
| PD-1 (47) | 290 | GAISLAPKAQIKESLRAELRVTERRAEVPTAHPSPSPRP |
| | | AGQFQTLV |
| PD-1 (42) | 291 | APKAQIKESLRAELRVTERRAEVPTAHPSPSPRPAGQF |
| | | QTLV |
| PD-1 (36) | 292 | KESLRAELRVTERRAEVPTAHPSPSPRPAGQFQTLV |
| PD-1 (30) | 293 | ELRVTERRAEVPTAHPSPSPRPAGQFQTLV |
| PD-1 (26) | 294 | TERRAEVPTAHPSPSPRPAGQFQTLV |
| PD-1 (20) | 295 | VPTAHPSPSPRPAGQFQTLV |

[0322] 3. iCAR Portion: Transmembrane Domain

[0323] In some embodiments, the bicistronic construct comprises an iCAR portion comprising a transmembrane (TM) domain component. In some embodiments, the TM domain comprises a TM domain selected from the group consisting of a PD-1 TM domain, a CD28 TM domain, a CD8 TM domain (including a CD8a TM domain), a LIR1 TM domain, a CD33 TM domain, and a KIR2DL1 TM domain. In some embodiments, the TM domain is a PD-1 TM domain (SEQ ID NO:97). In some embodiments, the TM domain is a CD28 TM domain (SEQ ID NO:96). In some embodiments, the vector comprises a CD8 TM domain. In some embodiments, the vector comprises a CD8a TM domain (SEQ ID NO:95). In some embodiments, the vector comprises a LIR1 TM domain (SEQ ID NO:98). In some embodiments, the vector comprises a CD33 TM domain (SEQ ID NO:99). In some embodiments, the vector comprises a KIR2DL1 TM domain (SEQ ID NO:100).

TABLE 6
iCAR transmembrane sequences

| Sequence | SEQ ID | |
|---|---|---|
| Information | NO | Amino acid sequence |
| CD8 alpha | 95 | IYIWAPLAGTCGVLLLSLVITL |
| | | YC |
| CD28 | 96 | FWVLVVVGGVLACYSLLVTV |
| | | AFIIFWV |
| PD-1 | 97 | VGVVGGLLGSLVLLVWVLA |
| | | VI |
| LIR1 | 98 | VIGILVAVILLLLLLLLLFLI |
| CD33 | 99 | GAIGGAGVTALLALCLCLIFFI |
| | | V |
| KIR2DL1 | 100 | ILIGTSVVIILFILLFFLL |

[0324] 4. iCAR Portion: Inhibitory Domain

[0325] In some embodiments, the bicistronic construct comprises an iCAR portion comprising an inhibitory domain component. In some embodiments, the iCAR portion comprises an inhibitory domain. In some embodiments, the inhibitory domain is selected from the group consisting of PD-1, KIR2DL1, KIR2DL2, KIR2DL3, KIR2DL4, KIR2DL5A, KIR3DL1, KIR3DL2, KIR3DL3, LAIR1, CD22, CD33, SIGLEC5, SIGLEC6, SIGLEC7, SIGLEC8, SIGLEC9, SIGLEC10, SIGLEC11, SIGLEC12, PECAM1/CD31, CD200R1, FCRL1, FCRL2, FCRL3, FCRL4, FCRL5, SLAMF1, SLAMF5, BTLA, LAGS, 2B4, CD160, CEACAM1, TIM3, VISTA, TIGIT, SIRPalpha, FcγRIIB, CD5, CD300a, CD300f, LIR1, LIR2, LIR3, LIR5, LIRE, Ly9, 2xPD1(G4S), 2xPD1(PD1), PVRIg, and AA2ARKIR2DL1, LIR1, and PD-1. In some embodiments, the inhibitory domain is KIR2DL1 (SEQ ID NO:102). In some embodiments, the inhibitory domain is LIR1 (SEQ ID NO:143). In some embodiments, the inhibitory domain is PD-1 (SEQ ID NO:101). In some embodiments, the inhibitory domain is KIR2DL2 (SEQ ID NO:103). In some embodiments, the inhibitory domain is KIR2DL3 (SEQ ID NO:104). In some embodiments, the inhibitory domain is KIR2DL4 (SEQ ID NO:105). In some embodiments, the inhibitory domain is KIR2DL5A (SEQ ID NO:106). In some embodiments, the inhibitory domain is KIR3DL1 (SEQ ID NO:107). In some embodiments, the inhibitory domain is KIR3DL2 (SEQ ID NO:108). In some embodiments, the inhibitory domain is KIR3DL3 (SEQ ID NO:109). In some embodiments, the inhibitory domain is LAIR1 (SEQ ID NO:110). In some embodiments, the inhibitory domain is CD22 (SEQ ID NO:111). In some embodiments, the inhibitory domain is CD33 (SEQ ID NO:112). In some embodiments, the inhibitory domain is SIGLEC5 (SEQ ID NO:113). In some embodiments, the inhibitory domain is SIGLEC6 (SEQ ID NO:114). In some embodiments, the inhibitory domain is SIGLEC7 (SEQ ID NO:115). In some embodiments, the inhibitory domain is SIGLEC8 (SEQ ID NO:116). In some embodiments, the inhibitory domain is SIGLEC9 (SEQ ID NO:117). In some embodiments, the inhibitory domain is SIGLEC10 (SEQ ID NO:118). In some embodiments, the inhibitory domain is SIGLEC11 (SEQ ID NO:119). In some embodiments, the inhibitory domain is SIGLEC12 (SEQ ID NO:120). In some embodiments, the inhibitory domain is PECAM1/CD31 (SEQ ID NO:121). In some embodiments, the inhibitory domain is CD200R1 (SEQ ID NO:122). In some embodiments, the inhibitory domain is FCRL1 (SEQ ID NO:123). In some embodiments, the inhibitory domain is FCRL2 (SEQ ID NO:124). In some embodiments, the inhibitory domain is FCRL3 (SEQ ID NO:125). In some embodiments, the inhibitory domain is FCRL4 (SEQ ID NO:126). In some embodiments, the inhibitory domain is FCRL5 (SEQ ID NO:127). In some embodiments, the inhibitory domain is SLAMF1 (SEQ ID NO:128). In some embodiments, the inhibitory domain is SLAMF5 (SEQ ID NO:129). In some embodiments, the inhibitory domain is BTLA (SEQ ID NO:130). In some embodiments, the inhibitory domain is LAG3 (SEQ ID NO:131). In some embodiments, the inhibitory domain is 2B4 (SEQ ID NO:132). In some embodiments, the inhibitory domain is CD160 (SEQ ID NO:133). In some embodiments, the inhibitory domain is CEACAM1 (SEQ ID NO:134). In some embodiments, the inhibitory domain is TIM3 (SEQ ID NO:135). In some embodiments, the inhibitory domain is VISTA (SEQ ID NO:136). In some embodiments, the inhibitory domain is TIGIT (SEQ ID NO:137). In some embodiments, the inhibitory domain is SIRPalpha (SEQ ID NO:138). In some embodiments, the inhibitory domain is FcγRIIB (SEQ ID NO:139). In some embodiments, the inhibitory domain is CD5 (SEQ ID NO:140). In some embodiments, the inhibitory domain is CD300a (SEQ ID NO:141). In some embodiments, the inhibitory domain is CD300f (SEQ ID NO:142). In some embodiments, the inhibitory domain is LIR2 (SEQ ID NO:144). In some embodiments, the inhibitory domain is LIR3 (SEQ ID NO:145). In some embodiments, the inhibitory domain is LIR5 (SEQ ID NO:146). In some embodiments, the inhibitory domain is LIR8 (SEQ ID NO:147). In some embodiments, the inhibitory domain is Ly9 (SEQ ID NO:148). In some embodiments, the inhibitory domain is 2xPD1(G4S) (SEQ ID NO:149). In some embodiments, the inhibitory domain is 2xPD1(PD1) (SEQ ID NO:150). In some embodiments, the inhibitory domain is PVRIg (SEQ ID NO:151). In some embodiments, the inhibitory domain is AA2AR (SEQ ID NO:152).

TABLE 7
iCAR inhibitory domain sequences

| | SEQ | |
|---|---|---|
| Sequence | ID | |
| Information | NO | Amino acid sequence |
| PD-1 | 101 | CSRAARGTIGARRTGQPLKEDPSAVPVFSVDYGELDFQWRE |
| | | KTPEPPVPCVPEQTEYATIVFPSGMGTSSPARRGSADGPRSA |
| | | QPLRPEDGHCSWPL |
| KIR2DL1 | 102 | HRWCSNKKNAAVMDQESAGNRTANSEDSDEQDPQEVTYT |
| | | QLNHCVFTQRKITRPSQRPKTPPTDIIVYTELPNAESRSKVVS |
| | | CP |
| KIR2DL2 | 103 | HRWCSNKKNAAVMDQESAGNRTANSEDSDEQDPQEVTYT |
| | | QLNHCVFTQRKITRPSQRPKTPPTDIIVYAELPNAESRSKVVS |
| | | CP |
| KIR2DL3 | 104 | HRWCCNKKNAVVMDQEPAGNRTVNREDSDEQDPQEVTYA |
| | | QLNHCVFTQRKITRPSQRPKTPPTDIIVYTELPNAEP |
| KIR2DL4 | 105 | RWCSKKKDAAVMNQEPAGHRTVNREDSDEQDPQEVTYAQ |
| | | LDHCIFTQRKITGPSQRSKRPSTDTSVCIELPNAEPRALSPAH |
| | | EHHSQALMGSSRETTALSQTQLASSNVPAAGI |
| KIR2DL5A | 106 | LHCCCSNKKNAAVMDQEPAGDRTVNREDSDDQDPQEVTY |
| | | AQLDHCVFTQTKITSPSQRPKTPPTDTTMYMELPNAKPRSLS |
| | | PAHKHHSQALRGSSRETTALSQNRVASSHVPAAGI |
| KIR3DL1 | 107 | HLWCSNKKNAAVMDQEPAGNRTANSEDSDEQDPEEVTYA |
| | | QLDHCVFTQRKITRPSQRPKTPPTDTILYTELPNAKPRSKVV |
| | | SCP |
| KIR3DL2 | 108 | YRWCSNKKNAAVMDQEPAGDRTVNRQDSDEQDPQEVTYA |
| | | QLDHCVFIQRKISRPSQRPKTPLTDTSVYTELPNAEPRSKVVS |
| | | CPRAPQSGLEGVF |
| KIR3DL3 | 109 | HRWCANKKNAVVMDQEPAGNRTVNREDSDEQDPQEVTYA |
| | | QLNHCVFTQRKITRPSQRPKTPPTDTSV |
| LAIR1 | 110 | HRQNQIKQGPPRSKDEEQKPQQRPDLAVDVLERTADKATV |
| | | NGLPEKDRETDTSALAAGSSQEVTYAQLDHWALTQRTARA |
| | | VSPQSTKPMAESITYAAVARH |
| CD22 | 111 | KLQRRWKRTQSQQGLQENSSGQSFFVRNKKVRRAPLSEGP |
| | | HSLGCYNPMMEDGISYTTLRFPEMNIPRTGDAESSEMQRPPP |
| | | DCDDTVTYSALHKRQVGDYENVIPDFPEDEGIHYSELIQFGV |
| | | GERPQAQENVDYVILKH |
| CD33 | 112 | KTHRRKAARTAVGRNDTHPTTGSASPKHQKKSKLHGPTETS |
| | | SCSGAAPTVEMDEELHYASLNFHGMNPSKDTSTEYSEVRTQ |
| SIGLEC5 | 113 | KARRKQAAGRPEKMDDEDPIMGTITSGSRKKPWPDSPGDQ |
| | | ASPPGDAPPLEEQKELHYASLSFSEMKSREPKDQEAPSTTEY |
| | | SEIKTSK |
| SIGLEC6 | 114 | RVKTRRKKAAQPVQNTDDVNPVMVSGSRGHQHQFQTGIVS |
| | | DHPAEAGPISEDEQELHYAVLHFHKVQPQEPKVTDTEYSEIK |
| | | IHK |
| SIGLEC7 | 115 | RSCRKKSARPAADVGDIGMKDANTIRGSASQGNLTESWAD |
| | | DNPRHHGLAAHSSGEEREIQYAPLSFHKGEPQDLSGQEATN |
| | | NEYSEIKIPK |
| SIGLEC8 | 116 | RSCRKKSARPAAGVGDTGMEDAKAIRGSASQGPLTESWKD |
| | | GNPLKKPPPAVAPSSGEEGELHYATLSFHKVKPQDPQGQEA |
| | | TDSEYSEIKIHKRETAETQACLRNHNPSSKEVRG |
| SIGLEC9 | 117 | VRSCRKKSARPAAGVGDTGIEDANAVRGSASQGPLTEPWA |
| | | EDSPPDQPPPASARSSVGEGELQYASLSFQMVKPWDSRGQE |
| | | ATDTEYSEIKIHR |
| SIGLEC10 | 118 | KILPKRRTQTETPRPRFSRHSTILDYINVVPTAGPLAQKRNQK |
| | | ATPNSPRTPLPPGAPSPESKKNQKKQYQLPSFPEPKSSTQAPE |
| | | SQESQEELHYATLNFPGVRPRPEARMPKGTQADYAEVKFQ |
| SIGLEC11 | 119 | KICRKEARKRAAAEQDVPSTLGPISQGHQHECSAGSSQDHP |
| | | PPGAATYTPGKGEEQELHYASLSFQGLRLWEPADQEAPSTT |
| | | EYSEIKIHTGQPLRGPGFGLQLEREMSGMVPK |
| SIGLEC12 | 120 | RSCRKKSARPAVGVGDTGMEDANAVRGSASQGPLIESPAD |
| | | DSPPHHAPPALATPSPEEGEIQYASLSFHKARPQYPQEQEAIG |
| | | YEYSEINIPK |
| PECAM1/CD31 | 121 | KCYFLRKAKAKQMPVEMSRPAVPLLNSNNEKMSDPNMEA |
| | | NSHYGHNDDVRNHAMKPINDNKEPLNSDVQYTEVQVSSAE |
| | | SHKDLGKKDTETVYSEVRKAVPDAVESRYSRTEGSLDGT |
| CD200R1 | 122 | KVNGCRKYKLNKTESTPVVEEDEMQPYASYTEKNNPLYDT |
| | | TNKVKASEALQSEVDTDLHTL |
| FCRL1 | 123 | GLKRKIGRRSARDPLRSLPSPLPQEFTYLNSPTPGQLQPIYEN |
| | | VNVVSGDEVYSLAYYNQPEQESVAAETLGTHMEDKVSLDI |
| | | YSRLRKANITDVDYEDAM |
| FCRL2 | 124 | HKISGESSATNEPRGASRPNPQEFTYSSPTPDMEELQPVYVN |
| | | VGSVDVDVVYSQVWSMQQPESSANIRTLLENKDSQVIYSSV |
| | | KKS |
| FCRL3 | 125 | HYARARRKPGGLSATGTSSHSPSECQEPSSSRPSRIDPQEPTH |
| | | SKPLAPMELEPMYSNVNPGDSNPIYSQIWSIQHTKENSANCP |
| | | MMHQEHEELTVLYSELKKTHPDDSAGEASSRGRAHEEDDE |
| | | ENYENVPRVLLASDH |
| FCRL4 | 126 | HCWRRRKSGVGFLGDETRLPPAPGPGESSHSICPAQVELQSL |
| | | YVDVHPKKGDLVYSEIQTTQLGEEEEANTSRTLLEDKDVSV |
| | | VYSEVKTQHPDNSAGKISSKDEES |
| FCRL5 | 127 | LSRKAGRKPASDPARSPSDSDSQEPTYHNVPAWEELQPVYT |
| | | NANPRGENVVYSEVRIIQEKKKHAVASDPRHLRNKGSPIIYS |
| | | EVKVASTPVSGSLFLASSAPHR |
| SLAMF1 | 128 | QLRRRGKTNHYQTTVEKKSLTIYAQVQKPGPLQKKLDSFPA |
| | | QDPCTTIYVAATEPVPESVQETNSITVYASVTLPES |
| SLAMF5 | 129 | RLFKRRQGRIFPEGSCLNTFTKNPYAASKKTIYTYIMASRNT |
| | | QPAESRIYDEILQSKVLPSKEEPVNTVYSEVQFADKMGKAST |
| | | QDSKPPGTSSYEIVI |
| BTLA | 130 | RRHQGKQNELSDTAGREINLVDAHLKSEQTEASTRQNSQVL |
| | | LSETGIYDNDPDLCFRMQEGSEVYSNPCLEENKPGIVYASLN |
| | | HSVIGPNSRLARNVKEAPTEYASICVRS |
| LAG3 | 131 | HLWRRQWRPRRFSALEQGIHPPQAQSKIEELEQEPEPEPEPE |
| | | PEPEPEPEPEQL |
| 2B4 | 132 | WRRKRKEKQSETSPKEFLTIYEDVKDLKTRRNHEQEQTFPG |
| | | GGSTIYSMIQSQSSAPTSQEPAYTLYSLIQPSRKSGSRKRNHS |
| | | PSFNSTIYEVIGKSQPKAQNPARLSRKELENFDVYS |
| CD160 | 133 | GCINITSSASQEGTRLNLICTVWHKKEEAEGFVVFLCKDRSG |
| | | DCSPETSLKQLRLKRDPGIDGVGEISSQLMFTISQVTPLHSGT |
| | | YQCCARSQKSGIRLQGHFFSILFTETGNYTVTGLKQRQHLEF |
| | | SHNEGTLS |
| CEACAM1 | 134 | HFGKTGRASDQRDLTEHKPSVSNHTQDHSNDPPNKMNEVT |
| | | YSTLNFEAQQPTQPTSASPSLTATEIIYSEVKKQ |
| TIM3 | 135 | FKWYSHSKEKIQNLSLISLANLPPSGLANAVAEGIRSEENIYT |
| | | IEENVYEVEEPNEYYCYVSSRQQPSQPLGCRFAMP |
| VISTA | 136 | YKQRQAASNRRAQELVRMDSNIQGIENPGFEASPPAQGIPE |
| | | AKVRHPLSYVAQRQPSESGRHLLSEPSTPLSPPGPGDVFFPSL |
| | | DPVPDSPNFEVI |
| TIGIT | 137 | LTRKKKALRIHSVEGDLRRKSAGQEEWSPSAPSPPGSCVQA |
| | | EAAPAGLCGEQRGEDCAELHDYFNVLSYRSLGNCSFFTETG |
| SIRPalpha | 138 | RIRQKKAQGSTSSTRLHEPEKNAREITQDTNDITYADLNLPK |
| | | GKKPAPQAAEPNNHTEYASIQTSPQPASEDTLTYADLDMVH |
| | | LNRTPKQPAPKPEPSFSEYASVQVPRK |
| FcγRIIB | 139 | VVALIYCRKKRISALPGYPECREMGETLPEKPANPTNPDEAD |
| | | KVGAENTITYSLLMHPDALEEPDDQNRI |
| CD5 | 140 | KKLVKKFRQKKQRQWIGPTGMNQNMSFHRNHTATVRSHA |
| | | ENPTASHVDNEYSQPPRNSHLSAYPALEGALHRSSMQPDNS |
| | | SDSDYDLHGAQRL |
| CD300a | 141 | RMFQKWIKAGDHSELSQNPKQAATQSELHYANLELLMWPL |
| | | QEKPAPPREVEVEYSTVASPREELHYASVVFDSNTNRIAAQ |
| | | RPREEEPDSDYSVIRKT |
| CD300f | 142 | WRMMKYQQKAAGMSPEQVLQPLEGDLCYADLTLQLAGTS |
| | | PQKATTKLSSAQVDQVEVEYVTMASLPKEDISYASLTLGAE |
| | | DQEPTYCNMGHLSSHLPGRGPEEPTEYSTISRP |
| LIR1 | 143 | LRHRRQGKHWTSTQRKADFQHPAGAVGPEPTDRGLQWRSS |
| | | PAADAQEENLYAAVKHTQPEDGVEMDTRSPHDEDPQAVTY |
| | | AEVKHSRPRREMASPPSPLSGEFLDTKDRQAEEDRQMDTEA |
| | | AASEAPQDVTYAQLHSLTLRREATEPPPSQEGPSPAVPSIYA |
| | | TLAIH |
| LIR2 | 144 | LRHRRQGKHWTSTQRKADFQHPAGAVGPEPTDRGLQWRSS |
| | | PAADAQEENLYAAVKDTQPEDGVEMDTRAAASEAPQDVT |
| | | YAQLHSLTLRRKATEPPPSQEREPPAEPSIYATLAIH |
| LIR3 | 145 | RRQRHSKHRTSDQRKTDFQRPAGAAETEPKDRGLLRRSSPA |
| | | ADVQEENLYAAVKDTQSEDRVELDSQSPHDEDPQAVTYAP |
| | | VKHSSPRREMASPPSSLSGEFLDTKDRQVEEDRQMDTEAAA |
| | | SEASQDVTYAQLHSLTLRRKATEPPPSQEGEPPAEPSIYATL |
| | | AIH |
| LIR5 | 146 | QHWRQGKHRTLAQRQADFQRPPGAAEPEPKDGGLQRRSSP |
| | | AADVQGENFCAAVKNTQPEDGVEMDTRQSPHDEDPQAVT |
| | | YAKVKHSRPRREMASPPSPLSGEFLDTKDRQAEEDRQMDTE |
| | | AAASEAPQDVTYAQLHSFTLRQKATEPPPSQEGASPAEPSV |
| | | YATLAIH |
| LIR8 | 147 | RHRHQSKHRTSAHFYRPAGAAGPEPKDQGLQKRASPVADI |
| | | QEEILNAAVKDTQPKDGVEMDARAAASEAPQDVTYAQLHS |
| | | LTLRREATEPPPSQEREPPAEPSIYAPLAIH |
| Ly9 | 148 | KRKGRCSVPAFCSSQAEAPADTPEPTAGHTLYSVLSQGYEK |
| | | LDTPLRPARQQPTPTSDSSSDSNLTTEEDEDRPEVHKPISGRY |
| | | EVFDQVTQEGAGHDPAPEGQADYDPVTPYVTEVESVVGEN |
| | | TMYAQVFNLQGKTPVSQKEESSATIYCSIRKPQVVPPPQQN |
| | | DLEIPESPTYENFT |
| 2xPD1(G4S) | 149 | CSRAARGTIGARRTGQPLKEDPSAVPVFSVDYGELDFQWRE |
| | | KTPEPPVPCVPEQTEYATIVFPSGMGTSSPARRGSADGPRSA |
| | | QPLRPEDGHCSWPLGGGGSGGGGSCSRAARGTIGARRTGQP |
| | | LKEDPSAVPVFSVDYGELDFQWREKTPEPPVPCVPEQTEYA |
| | | TIVFPSGMGTSSPARRGSADGPRSAQPLRPEDGHCSWPL |
| 2xPD1(PD1) | 150 | CSRAARGTIGARRTGQPLKEDPSAVPVFSVDYGELDFQWRE |
| | | KTPEPPVPCVPEQTEYATIDFQWREKTPEPPVPCVPEQVDYG |
| | | ELDFQWREKTPEPPVPCVPEQTEYATIVFPSGMGTSSPARRG |
| | | SADGPRSAQPLRPEDGHCSWPL |
| PVRIg | 151 | LRRHKHRPAPRLQPSRTSPQAPRARAWAPSQASQAALHVPY |
| | | ATINTSCRPATLDTAHPHGGPSWWASLPTHAAHRPQGPAA |
| | | WASTPIPARGSFVSVENGLYAQAGERPPHTGPGLTLFPDPRG |
| | | PRAMEGPLGVR |
| AA2AR | 152 | RIREFRQTFRKIIRSHVLRQQEPFKAAGTSARVLAAHGSDGE |
| | | QVSLRLNGHPPGVWANGSAPHPERRPNGYALGLVSGGSAQ |
| | | ESQGNTGLPDVELLSHELKGVCPEPPGLDDPLAQDGAGVS |

[0326] 5. Optional Synthetic PD-1

[0327] In some embodiments, the iCAR construct comprises an optional synthetic PD-1 sequence. In some embodiments, the iCAR comprises a synthetic PD-1 sequence shown in Table 8. In some embodiments, the iCAR construct comprises an optional synthetic LIR1 sequence. In some embodiments, the iCAR comprises a synthetic LIR1 sequence shown in Table 8.

TABLE 8
synthetic PD-1 and LIR1 sequences

| SEQ | |
|---|---|
| ID NO | Sequence intracellular synPD-1 |
| 243 | CSRAARGTIGARRTGQPLKEDPSAVPVFSVDYGELVFPSGMGTSSPARR |
| | GSADGPRSAQPLRPEDGHCSWPL |
| 244 | CSRAARGTIGARRTGQPLKEDPSAVPVFSVDYGELDFQWREKTPEPPVP |
| | CVPEQVDYGELVFPSGMGTSSPARRGSADGPRSAQPLRPEDGHCSWPL |
| 245 | CSRAARGTIGARRTGQPLKEDPSAVPVFSVDYGELDFQWREKTPEPPVP |
| | CVPEQVDYGELDFQWREKTPEPPVPCVPEQVDYGELVFPSGMGTSSPAR |
| | RGSADGPRSAQPLRPEDGHCSWPL |
| 246 | CSRAARGTIGARRTGQPLKEDPSAVPVFSVDYGELDFQWREKTPEPPVP |
| | CVPEQVDYGELDFQWREKTPEPPVPCVPEQVDYGELDFQWREKTPEPP |
| | VPCVPEQVDYGELVFPSGMGTSSPARRGSADGPRSAQPLRPEDGHCSWP |
| | L |
| 247 | CSRAARGTIGARRTGQPLKEDPSAVPVFSVDYGELDFQWREKTPEPPVP |
| | CVPEQVDYGELDFQWREKTPEPPVPCVPEQVDYGELDFQWREKTPEPP |
| | VPCVPEQVDYGELDFQWREKTPEPPVPCVPEQVDYGELVFPSGMGTSSP |
| | ARRGSADGPRSAQPLRPEDGHCSWPL |
| 248 | CSRAARGTIGARRTGQPLKEDPSAVPVFSTEYATIVFPSGMGTSSPARRG |
| | SADGPRSAQPLRPEDGHCSWPL |
| 249 | CSRAARGTIGARRTGQPLKEDPSAVPVFSTEYATIDFQWREKTPEPPVPC |
| | VPEQTEYATIVFPSGMGTSSPARRGSADGPRSAQPLRPEDGHCSWPL |
| 250 | CSRAARGTIGARRTGQPLKEDPSAVPVFSTEYATIDFQWREKTPEPPVPC |
| | VPEQTEYATIDFQWREKTPEPPVPCVPEQTEYATIVFPSGMGTSSPARRG |
| | SADGPRSAQPLRPEDGHCSWPL |
| 251 | CSRAARGTIGARRTGQPLKEDPSAVPVFSTEYATIDFQWREKTPEPPVPC |
| | VPEQTEYATIDFQWREKTPEPPVPCVPEQTEYATIDFQWREKTPEPPVPC |
| | VPEQTEYATIVFPSGMGTSSPARRGSADGPRSAQPLRPEDGHCSWPL |
| 252 | CSRAARGTIGARRTGQPLKEDPSAVPVESTEYATIDFQWREKTPEPPVPC |
| | VPEQTEYATIDFQWREKTPEPPVPCVPEQTEYATIDFQWREKTPEPPVPC |
| | VPEQTEYATIDFQWREKTPEPPVPCVPEQTEYATIVFPSGMGTSSPARRG |
| | SADGPRSAQPLRPEDGHCSWPL |
| 253 | CSRAARGTIGARRTGQPLKEDPSAVPVFSVDYGELDFQWREKTPEPPVP |
| | CVPEQTEYATIVFPSGMGTSSPARRGSADGPRSAQPLRPEDGHCSWPLG |
| | GGGSGGGGSCSRAARGTIGARRTGQPLKEDPSAVPVFSVDYGELDFQW |
| | REKTPEPPVPCVPEQTEYATIVFPSGMGTSSPARRGSADGPRSAQPLRPE |
| | DGHCSWPL |
| 254 | CSRAARGTIGARRTGQPLKEDPSAVPVFSVDYGELDFQWREKTPEPPVP |
| | CVPEQTEYATIDFQWREKTPEPPVPCVPEQVDYGELDFQWREKTPEPPV |
| | PCVPEQTEYATIVFPSGMGTSSPARRGSADGPRSAQPLRPEDGHCSWPL |
| 296 | LRHRRQGKHWTSTQRKADFQHPAGAVGPEPTDRGLQWRSSPAADAQE |
| | ENLYAAVKHTQPEDGVEMDTRSPHDEDPQANLYAAVKHSRPRREMAS |
| | PPSPLSGEFLDTKDRQAEEDRQMDTEAAASEAPQDNLYAAVHSLTLRRE |
| | ATEPPPSQEGPSPAVPNLYAAVAIH |
| 297 | LRHRRQGKHWTSTQRKADFQHPAGAVGPEPTDRGLQWRSSPAADAQE |
| | EVTYAEVKHTQPEDGVEMDTRSPHDEDPQAVTYAEVKHSRPRREMASP |
| | PSPLSGEFLDTKDRQAEEDRQMDTEAAASEAPQDVTYAEVHSLTLRREA |
| | TEPPPSQEGPSPAVPVTYAEVAIH |
| 298 | LRHRRQGKHWTSTQRKADFQHPAGAVGPEPTDRGLQWRSSPAADAQE |
| | EVTYAQLKHTQPEDGVEMDTRSPHDEDPQAVTYAQLKHSRPRREMASP |
| | PSPLSGEFLDTKDRQAEEDRQMDTEAAASEAPQDVTYAQLHSLTLRREA |
| | TEPPPSQEGPSPAVPVTYAQLAIH |
| 299 | LRHRRQGKHWTSTQRKADFQHPAGAVGPEPTDRGLQWRSSPAADAQE |
| | ESIYATLKHTQPEDGVEMDTRSPHDEDPQASIYATLKHSRPRREMASPPS |
| | PLSGEFLDTKDRQAEEDRQMDTEAAASEAPQDSIYATLHSLTLRREATE |
| | PPPSQEGPSPAVPSIYATLAIH |
| 300 | LRHRRQGKHWTSTQRKADFQHPAGAVGPEPTDRGLQWRSSPAADAQE |
| | EVTYAQLKHTQPEDGVEMDTRSPHDEDPQASIYATLKHSRPRREMASPP |
| | SPLSGEFLDTKDRQAEEDRQMDTEAAASEAPQDVTYAQLHSLTLRREAT |
| | EPPPSQEGPSPAVPSIYATLAIH |
| 301 | LRHRRQGKHWTSTQRKADFQHPAGAVGPEPTDRGLQWRSSPAADAQE |
| | ETEYATIKHTQPEDGVEMDTRSPHDEDPQATEYATIKHSRPRREMASPPS |
| | PLSGEFLDTKDRQAEEDRQMDTEAAASEAPQDVTYAQLHSLTLRREAT |
| | EPPPSQEGPSPAVPSIYATLAIH |
| 302 | LRHRRQGKHWTSTQRKADFQHPAGAVGPEPTDRGLQWRSSPAADAQE |
| | EVTYAQLKHTQPEDGVEMDTRSPHDEDPQASIYATLKHSRPRREMASPP |
| | SPLSGEFLDTKDRQAEEDRQMDTEAAASEAPQDTEYATIHSLTLRREAT |
| | EPPPSQEGPSPAVPTEYATIAIH |
| 304 | LRHRRQGKHWTSTQRKADFQHPAGAVGPEPTDRGLQWRSSPAADAQE |
| | EVTYAQLKHTQPEDGVEMDTRSPHDEDPQATEYATIKHSRPRREMASPP |
| | SPLSGEFLDTKDRQAEEDRQMDTEAAASEAPQDTEYATIHSLTLRREAT |
| | EPPPSQEGPSPAVPSIYATLAIH |

[0328] 6. Exemplary iCARs

[0329] In some embodiments, the iCAR comprises an scFv component comprising the VL and VH sequences of BB7.2 (SEQ ID NOs: 37 and 38). In some embodiments, the orientation of the iCAR VH and VL regions is VH-VL. In some embodiments, the orientation of the iCAR VH and VL regions is VL-VH. In some embodiments, the iCAR scFv comprises a (G₄S)X3 linker (SEQ ID NO:81) linker that covalently connects the VH and the VL to form the iCAR scFv. In some embodiments, the iCAR scFv comprises a Whitlow linker (SEQ ID NO:82) linker that covalently connects the VH and the VL to form the iCAR scFv. In some embodiments, the iCAR comprises a CD8 alpha hinge domain (SEQ ID NO:84). In some embodiments, the iCAR comprises a CD28 hinge domain (SEQ ID NO:85). In some embodiments, the iCAR comprises a PD-1 hinge domain (SEQ ID NO:86). In some embodiments, the iCAR comprises a LIR1 Ig3-4 hinge domain (SEQ ID NO:87). In some embodiments, the iCAR comprises a LIR1 Ig-4 hinge domain (SEQ ID NO:88). In some embodiments, the iCAR comprises a LIR1 52 aa hinge domain (SEQ ID NO:89). In some embodiments, the iCAR comprises a LIR1 36 aa hinge domain (SEQ ID NO:90). In some embodiments, the iCAR comprises a LIR1 30 aa hinge domain (SEQ ID NO:91). In some embodiments, the iCAR comprises a LIR1 8 aa hinge domain (SEQ ID NO:92). In some embodiments, the iCAR comprises a CD33 hinge domain (SEQ ID NO:93). In some embodiments, the iCAR comprises a KIR2DL1 hinge domain (SEQ ID NO:94). In some embodiments, the iCAR comprises aLIR1 26 aa (SEQ ID NO: 289). In some embodiments, the iCAR comprises PD-1 (47) (SEQ ID NO: 290). In some embodiments, the iCAR comprises PD-1 (42) (SEQ ID NO: 291). In some embodiments, the iCAR comprises PD-1 (36) (SEQ ID NO: 292). In some embodiments, the iCAR comprises PD-1 (30) (SEQ ID NO: 293). In some embodiments, the iCAR comprises PD-1 (26) (SEQ ID NO: 294). In some embodiments, the iCAR comprises PD-1 (20) (SEQ ID NO: 295). In some embodiments, the iCAR comprises a CD8 alpha transmembrane domain (SEQ ID NO:95). In some embodiments, the iCAR comprises a CD28 transmembrane domain (SEQ ID NO:96). In some embodiments, the iCAR comprises a PD-1 transmembrane domain (SEQ ID NO:97). In some embodiments, the iCAR comprises a LIR1 transmembrane domain (SEQ ID NO:98). In some embodiments, the iCAR comprises a CD33 transmembrane domain (SEQ ID NO:99). In some embodiments, the iCAR comprises a KIR2DL1 transmembrane domain (SEQ ID NO:100). In some embodiments, the iCAR comprises a PD-1 inhibitory domain (SEQ ID NO:101). In some embodiments, the iCAR comprises a KIR2DL1 inhibitory domain (SEQ ID NO:102). In some embodiments, the iCAR comprises a KIR2DL2 inhibitory domain (SEQ ID NO:103). In some embodiments, the iCAR comprises a KIR2DL3 inhibitory domain (SEQ ID NO:104). In some embodiments, the iCAR comprises a KIR2DL4 inhibitory domain (SEQ ID NO:105). In some embodiments, the iCAR comprises a KIR2DL5A inhibitory domain (SEQ ID NO:106). In some embodiments, the iCAR comprises a KIR3DL1 inhibitory domain (SEQ ID NO:107). In some embodiments, the iCAR comprises a KIR3DL2 inhibitory domain (SEQ ID NO:108). In some embodiments, the iCAR comprises a KIR3DL3 inhibitory domain (SEQ ID NO:109). In some embodiments, the iCAR comprises a LAIR1 inhibitory domain (SEQ ID NO:110). In some embodiments, the iCAR comprises a CD22 inhibitory domain (SEQ ID NO:111). In some embodiments, the iCAR comprises a CD33 inhibitory domain (SEQ ID NO: 112). In some embodiments, the iCAR comprises a SIGLEC5 inhibitory domain (SEQ ID NO: 113). In some embodiments, the iCAR comprises a SIGLEC6 inhibitory domain (SEQ ID NO:114). In some embodiments, the iCAR comprises a SIGLEC7 inhibitory domain (SEQ ID NO: 115). In some embodiments, the iCAR comprises a SIGLEC8 inhibitory domain (SEQ ID NO: 116). In some embodiments, the iCAR comprises a SIGLEC9 inhibitory domain (SEQ ID NO: 117). In some embodiments, the iCAR comprises a SIGLEC10 inhibitory domain (SEQ ID NO: 118). In some embodiments, the iCAR comprises a SIGLEC11 inhibitory domain (SEQ ID NO: 119). In some embodiments, the iCAR comprises a SIGLEC12 inhibitory domain (SEQ ID NO:120). In some embodiments, the iCAR comprises a PECAM1/CD31 inhibitory domain (SEQ ID NO:121). In some embodiments, the iCAR comprises a CD200R1 inhibitory domain (SEQ ID NO:]122). In some embodiments, the iCAR comprises a FCRL1 inhibitory domain (SEQ ID NO:123). In some embodiments, the iCAR comprises a FCRL2 inhibitory domain (SEQ ID NO:124). In some embodiments, the iCAR comprises a FCRL3 inhibitory domain (SEQ ID NO:125). In some embodiments, the iCAR comprises a FCRL4 inhibitory domain (SEQ ID NO:126). In some embodiments, the iCAR comprises a FCRL5 inhibitory domain (SEQ ID NO:127). In some embodiments, the iCAR comprises a SLAMF1 inhibitory domain (SEQ ID NO:128). In some embodiments, the iCAR comprises a SLAMF5 inhibitory domain (SEQ ID NO:129). In some embodiments, the iCAR comprises a BTLA inhibitory domain (SEQ ID NO:130). In some embodiments, the iCAR comprises a LAG3 inhibitory domain (SEQ ID NO:131). In some embodiments, the iCAR comprises a 2B4 inhibitory domain (SEQ ID NO:132). In some embodiments, the iCAR comprises a CD160 inhibitory domain (SEQ ID NO:133). In some embodiments, the iCAR comprises a CEACAM1 inhibitory domain (SEQ ID NO:134). In some embodiments, the iCAR comprises a TIM3 inhibitory domain (SEQ ID NO:135). In some embodiments, the iCAR comprises a VISTA inhibitory domain (SEQ ID NO:136). In some embodiments, the iCAR comprises a TIGIT inhibitory domain (SEQ ID NO:137). In some embodiments, the iCAR comprises a SIRPalpha inhibitory domain (SEQ ID NO:138). In some embodiments, the iCAR comprises a FcγRIIB inhibitory domain (SEQ ID NO:139). In some embodiments, the iCAR comprises a CD5 inhibitory domain (SEQ ID NO:140). In some embodiments, the iCAR comprises a CD300a inhibitory domain (SEQ ID NO:141). In some embodiments, the iCAR comprises a CD300f inhibitory domain (SEQ ID NO:142). In some embodiments, the iCAR comprises a LIR1 inhibitory domain (SEQ ID NO:143). In some embodiments, the iCAR comprises a LIR2 inhibitory domain (SEQ ID NO:144). In some embodiments, the iCAR comprises a LIR3 inhibitory domain (SEQ ID NO:145). In some embodiments, the iCAR comprises a LIR5 inhibitory domain (SEQ ID NO:146). In some embodiments, the iCAR comprises a LIR8 inhibitory domain (SEQ ID NO:147). In some embodiments, the iCAR comprises a Ly9 inhibitory domain (SEQ ID NO:148). In some embodiments, the iCAR comprises a 2xPD1(G4S) inhibitory domain (SEQ ID NO:149). In some embodiments, the iCAR comprises a 2xPD1(PD1) inhibitory domain (SEQ ID NO:150). In some embodiments, the iCAR comprises a PVRIg inhibitory domain (SEQ ID NO:151). In some embodiments, the iCAR comprises an AA2AR inhibitory domain (SEQ ID NO:152). In some embodiments, the iCAR comprises a signal peptide upstream of the iCAR portion, wherein the signal peptide is a CD8 alpha signal peptide (SEQ ID NO: 161), a GM-CSF signal peptide (SEQ ID NO: 162), or a mIgK signal peptide (SEQ ID NO: 306). In some embodiments, the iCAR comprises an scFv component comprising the VL and VH sequences of 3PF12/C4 (SEQ ID NOs: 39 and 40). In some embodiments, the orientation of the iCAR VH and VL regions is VH-VL. In some embodiments, the orientation of the iCAR VH and VL regions is VL-VH. In some embodiments, the iCAR scFv comprises a (G4S)X3 linker (SEQ ID NO:81) linker that covalently connects the VH and the VL to form the iCAR scFv. In some embodiments, the iCAR scFv comprises a Whitlow linker (SEQ ID NO:82) linker that covalently connects the VH and the VL to form the iCAR scFv. In some embodiments, the iCAR comprises a CD8 alpha hinge domain (SEQ ID NO:84). In some embodiments, the iCAR comprises a CD28 hinge domain (SEQ ID NO:85). In some embodiments, the iCAR comprises a PD-1 hinge domain (SEQ ID NO:86). In some embodiments, the iCAR comprises a LIR1 Ig3-4 hinge domain (SEQ ID NO:87). In some embodiments, the iCAR comprises a LIR1 Ig-4 hinge domain (SEQ ID NO:88). In some embodiments, the iCAR comprises a LIR1 52 aa hinge domain (SEQ ID NO:89). In some embodiments, the iCAR comprises a LIR1 36 aa hinge domain (SEQ ID NO:90). In some embodiments, the iCAR comprises a LIR1 30 aa hinge domain (SEQ ID NO:91). In some embodiments, the iCAR comprises a LIR1 8 aa hinge domain (SEQ ID NO:92). In some embodiments, the iCAR comprises a CD33 hinge domain (SEQ ID NO:93). In some embodiments, the iCAR comprises a KIR2DL1 hinge domain (SEQ ID NO:94). In some embodiments, the iCAR comprises aLIR1 26 aa hinge domain (SEQ ID NO: 289). In some embodiments, the iCAR comprises PD-1 (47) hinge domain (SEQ ID NO: 290). In some embodiments, the iCAR comprises PD-1 (42) hinge domain (SEQ ID NO: 291). In some embodiments, the iCAR comprises PD-1 (36) hinge domain (SEQ ID NO: 292). In some embodiments, the iCAR comprises PD-1 (30) hinge domain (SEQ ID NO: 293). In some embodiments, the iCAR comprises PD-1 (26) hinge domain (SEQ ID NO: 294). In some embodiments, the iCAR comprises PD-1 (20) hinge domain (SEQ ID NO: 295). In some embodiments, the iCAR comprises a CD8 alpha transmembrane domain (SEQ ID NO:95). In some embodiments, the iCAR comprises a CD28 transmembrane domain (SEQ ID NO:96). In some embodiments, the iCAR comprises a PD-1 transmembrane domain (SEQ ID NO:97). In some embodiments, the iCAR comprises a LIR1 transmembrane domain (SEQ ID NO:98). In some embodiments, the iCAR comprises a CD33 transmembrane domain (SEQ ID NO:99). In some embodiments, the iCAR comprises a KIR2DL1 transmembrane domain (SEQ ID NO:100). In some embodiments, the iCAR comprises a PD-1 inhibitory domain (SEQ ID NO:101). In some embodiments, the iCAR comprises a KIR2DL1 inhibitory domain (SEQ ID NO:102). In some embodiments, the iCAR comprises a KIR2DL2 inhibitory domain (SEQ ID NO:103). In some embodiments, the iCAR comprises a KIR2DL3 inhibitory domain (SEQ ID NO:104). In some embodiments, the iCAR comprises a KIR2DL4 inhibitory domain (SEQ ID NO:105). In some embodiments, the iCAR comprises a KIR2DL5A inhibitory domain (SEQ ID NO:106). In some embodiments, the iCAR comprises a KIR3DL1 inhibitory domain (SEQ ID NO:107). In some embodiments, the iCAR comprises a KIR3DL2 inhibitory domain (SEQ ID NO:108). In some embodiments, the iCAR comprises a KIR3DL3 inhibitory domain (SEQ ID NO:109). In some embodiments, the iCAR comprises a LAIR1 inhibitory domain (SEQ ID NO:110). In some embodiments, the iCAR comprises a CD22 inhibitory domain (SEQ ID NO:111). In some embodiments, the iCAR comprises a CD33 inhibitory domain (SEQ ID NO:112). In some embodiments, the iCAR comprises a SIGLEC5 inhibitory domain (SEQ ID NO: 113). In some embodiments, the iCAR comprises a SIGLEC6 inhibitory domain (SEQ ID NO: 114). In some embodiments, the iCAR comprises a SIGLEC7 inhibitory domain (SEQ ID NO: 115). In some embodiments, the iCAR comprises a SIGLEC8 inhibitory domain (SEQ ID NO: 116). In some embodiments, the iCAR comprises a SIGLEC9 inhibitory domain (SEQ ID NO: 117). In some embodiments, the iCAR comprises a SIGLEC10 inhibitory domain (SEQ ID NO: 118). In some embodiments, the iCAR comprises a SIGLEC11 inhibitory domain (SEQ ID NO: 119). In some embodiments, the iCAR comprises a SIGLEC12 inhibitory domain (SEQ ID NO:120). In some embodiments, the iCAR comprises a PECAM1/CD31 inhibitory domain (SEQ ID NO:121). In some embodiments, the iCAR comprises a CD200R1 inhibitory domain (SEQ ID NO:122). In some embodiments, the iCAR comprises a FCRL1 inhibitory domain (SEQ ID NO:123). In some embodiments, the iCAR comprises a FCRL2 inhibitory domain (SEQ ID NO:124). In some embodiments, the iCAR comprises a FCRL3 inhibitory domain (SEQ ID NO:125). In some embodiments, the iCAR comprises a FCRL4 inhibitory domain (SEQ ID NO:126). In some embodiments, the iCAR comprises a FCRL5 inhibitory domain (SEQ ID NO:127). In some embodiments, the iCAR comprises a SLAMF1 inhibitory domain (SEQ ID NO:128). In some embodiments, the iCAR comprises a SLAMF5 inhibitory domain (SEQ ID NO:129). In some embodiments, the iCAR comprises a BTLA inhibitory domain (SEQ ID NO:130). In some embodiments, the iCAR comprises a LAG3 inhibitory domain (SEQ ID NO:131). In some embodiments, the iCAR comprises a 2B4 inhibitory domain (SEQ ID NO:132). In some embodiments, the iCAR comprises a CD160 inhibitory domain (SEQ ID NO:133). In some embodiments, the iCAR comprises a CEACAM1 inhibitory domain (SEQ ID NO:134). In some embodiments, the iCAR comprises a TIM3 inhibitory domain (SEQ ID NO:135). In some embodiments, the iCAR comprises a VISTA inhibitory domain (SEQ ID NO:136). In some embodiments, the iCAR comprises a TIGIT inhibitory domain (SEQ ID NO:137). In some embodiments, the iCAR comprises a SIRPalpha inhibitory domain (SEQ ID NO:138). In some embodiments, the iCAR comprises a FcγRIIB inhibitory domain (SEQ ID NO:139). In some embodiments, the iCAR comprises a CD5 inhibitory domain (SEQ ID NO:140). In some embodiments, the iCAR comprises a CD300a inhibitory domain (SEQ ID NO:141). In some embodiments, the iCAR comprises a CD300f inhibitory domain (SEQ ID NO:142). In some embodiments, the iCAR comprises a LIR1 inhibitory domain (SEQ ID NO:143). In some embodiments, the iCAR comprises a LIR2 inhibitory domain (SEQ ID NO:144). In some embodiments, the iCAR comprises a LIR3 inhibitory domain (SEQ ID NO:145). In some embodiments, the iCAR comprises a LIR5 inhibitory domain (SEQ ID NO:146). In some embodiments, the iCAR comprises a LIR8 inhibitory domain (SEQ ID NO:147). In some embodiments, the iCAR comprises a Ly9 inhibitory domain (SEQ ID NO:148). In some embodiments, the iCAR comprises a 2xPD1(G4S) inhibitory domain (SEQ ID NO:149). In some embodiments, the iCAR comprises a 2xPD1(PD1) inhibitory domain (SEQ ID NO:150). In some embodiments, the iCAR comprises a PVRIg inhibitory domain (SEQ ID NO:151). In some embodiments, the iCAR comprises an AA2AR inhibitory domain (SEQ ID NO:152). In some embodiments, the iCAR comprises a signal peptide upstream of the iCAR portion, wherein the signal peptide is a CD8 alpha signal peptide (SEQ ID NO: 161), a GM-CSF signal peptide (SEQ ID NO: 162), or a mIgK signal peptide (SEQ ID NO: 306).

[0330] In some embodiments, the iCAR comprises an scFv component comprising the VL and VH sequences of 3PF12/F12 (SEQ ID NOs: 41 and 42). In some embodiments, the orientation of the iCAR VH and VL regions is VH-VL. In some embodiments, the orientation of the iCAR VH and VL regions is VL-VH. In some embodiments, the iCAR scFv comprises a (G4S)X3 linker (SEQ ID NO:81) linker that covalently connects the VH and the VL to form the iCAR scFv. In some embodiments, the iCAR scFv comprises a Whitlow linker (SEQ ID NO:82) linker that covalently connects the VH and the VL to form the iCAR scFv. In some embodiments, the iCAR comprises a CD8 alpha hinge domain (SEQ ID NO:84). In some embodiments, the iCAR comprises a CD28 hinge domain (SEQ ID NO:85). In some embodiments, the iCAR comprises a PD-1 hinge domain (SEQ ID NO:86). In some embodiments, the iCAR comprises a LIR1 Ig3-4 hinge domain (SEQ ID NO:87). In some embodiments, the iCAR comprises a LIR1 Ig-4 hinge domain (SEQ ID NO:88). In some embodiments, the iCAR comprises a LIR1 52 aa hinge domain (SEQ ID NO:89). In some embodiments, the iCAR comprises a LIR1 36 aa hinge domain (SEQ ID NO:90). In some embodiments, the iCAR comprises a LIR1 30 aa hinge domain (SEQ ID NO:91). In some embodiments, the iCAR comprises a LIR1 8 aa hinge domain (SEQ ID NO:92). In some embodiments, the iCAR comprises a CD33 hinge domain (SEQ ID NO:93). In some embodiments, the iCAR comprises a KIR2DL1 hinge domain (SEQ ID NO:94). In some embodiments, the iCAR comprises aLIR1 26 aa hinge domain (SEQ ID NO: 289). In some embodiments, the iCAR comprises PD-1 (47) hinge domain (SEQ ID NO: 290). In some embodiments, the iCAR comprises PD-1 (42) hinge domain (SEQ ID NO: 291). In some embodiments, the iCAR comprises PD-1 (36) hinge domain (SEQ ID NO: 292). In some embodiments, the iCAR comprises PD-1 (30) hinge domain (SEQ ID NO: 293). In some embodiments, the iCAR comprises PD-1 (26) hinge domain (SEQ ID NO: 294). In some embodiments, the iCAR comprises PD-1 (20) hinge domain (SEQ ID NO: 295). In some embodiments, the iCAR comprises a CD8 alpha transmembrane domain (SEQ ID NO:95). In some embodiments, the iCAR comprises a CD28 transmembrane domain (SEQ ID NO:96). In some embodiments, the iCAR comprises a PD-1 transmembrane domain (SEQ ID NO:97). In some embodiments, the iCAR comprises a LIR1 transmembrane domain (SEQ ID NO:98). In some embodiments, the iCAR comprises a CD33 transmembrane domain (SEQ ID NO:99). In some embodiments, the iCAR comprises a KIR2DL1 transmembrane domain (SEQ ID NO:100). In some embodiments, the iCAR comprises a PD-1 inhibitory domain (SEQ ID NO:101). In some embodiments, the iCAR comprises a KIR2DL1 inhibitory domain (SEQ ID NO:102). In some embodiments, the iCAR comprises a KIR2DL2 inhibitory domain (SEQ ID NO:103). In some embodiments, the iCAR comprises a KIR2DL3 inhibitory domain (SEQ ID NO:104). In some embodiments, the iCAR comprises a KIR2DL4 inhibitory domain (SEQ ID NO:105). In some embodiments, the iCAR comprises a KIR2DL5A inhibitory domain (SEQ ID NO:106). In some embodiments, the iCAR comprises a KIR3DL1 inhibitory domain (SEQ ID NO:107). In some embodiments, the iCAR comprises a KIR3DL2 inhibitory domain (SEQ ID NO:108). In some embodiments, the iCAR comprises a KIR3DL3 inhibitory domain (SEQ ID NO:109). In some embodiments, the iCAR comprises a LAIR1 inhibitory domain (SEQ ID NO:110). In some embodiments, the iCAR comprises a CD22 inhibitory domain (SEQ ID NO:111). In some embodiments, the iCAR comprises a CD33 inhibitory domain (SEQ ID NO:112). In some embodiments, the iCAR comprises a SIGLEC5 inhibitory domain (SEQ ID NO: 113). In some embodiments, the iCAR comprises a SIGLEC6 inhibitory domain (SEQ ID NO:114). In some embodiments, the iCAR comprises a SIGLEC7 inhibitory domain (SEQ ID NO: 115). In some embodiments, the iCAR comprises a SIGLEC8 inhibitory domain (SEQ ID NO: 116). In some embodiments, the iCAR comprises a SIGLEC9 inhibitory domain (SEQ ID NO: 117). In some embodiments, the iCAR comprises a SIGLEC10 inhibitory domain (SEQ ID NO: 118). In some embodiments, the iCAR comprises a SIGLEC11 inhibitory domain (SEQ ID NO: 119). In some embodiments, the iCAR comprises a SIGLEC12 inhibitory domain (SEQ ID NO:120). In some embodiments, the iCAR comprises a PECAM1/CD31 inhibitory domain (SEQ ID NO:121). In some embodiments, the iCAR comprises a CD200R1 inhibitory domain (SEQ ID NO:122). In some embodiments, the iCAR comprises a FCRL1 inhibitory domain (SEQ ID NO:123). In some embodiments, the iCAR comprises a FCRL2 inhibitory domain (SEQ ID NO:124). In some embodiments, the iCAR comprises a FCRL3 inhibitory domain (SEQ ID NO:125). In some embodiments, the iCAR comprises a FCRL4 inhibitory domain (SEQ ID NO:126). In some embodiments, the iCAR comprises a FCRL5 inhibitory domain (SEQ ID NO:127). In some embodiments, the iCAR comprises a SLAMF1 inhibitory domain (SEQ ID NO:128). In some embodiments, the iCAR comprises a SLAMF5 inhibitory domain (SEQ ID NO:129). In some embodiments, the iCAR comprises a BTLA inhibitory domain (SEQ ID NO:130). In some embodiments, the iCAR comprises a LAG3 inhibitory domain (SEQ ID NO:131). In some embodiments, the iCAR comprises a 2B4 inhibitory domain (SEQ ID NO:132). In some embodiments, the iCAR comprises a CD160 inhibitory domain (SEQ ID NO:133). In some embodiments, the iCAR comprises a CEACAM1 inhibitory domain (SEQ ID NO:134). In some embodiments, the iCAR comprises a TIM3 inhibitory domain (SEQ ID NO:135). In some embodiments, the iCAR comprises a VISTA inhibitory domain (SEQ ID NO:136). In some embodiments, the iCAR comprises a TIGIT inhibitory domain (SEQ ID NO:137). In some embodiments, the iCAR comprises a SIRPalpha inhibitory domain (SEQ ID NO:138). In some embodiments, the iCAR comprises a FcγRIIB inhibitory domain (SEQ ID NO:139). In some embodiments, the iCAR comprises a CD5 inhibitory domain (SEQ ID NO:140). In some embodiments, the iCAR comprises a CD300a inhibitory domain (SEQ ID NO:141). In some embodiments, the iCAR comprises a CD300f inhibitory domain (SEQ ID NO:142). In some embodiments, the iCAR comprises a LIR1 inhibitory domain (SEQ ID NO:143). In some embodiments, the iCAR comprises a LIR2 inhibitory domain (SEQ ID NO:144). In some embodiments, the iCAR comprises a LIR3 inhibitory domain (SEQ ID NO:145). In some embodiments, the iCAR comprises a LIR5 inhibitory domain (SEQ ID NO:146). In some embodiments, the iCAR comprises a LIR8 inhibitory domain (SEQ ID NO:147). In some embodiments, the iCAR comprises a Ly9 inhibitory domain (SEQ ID NO:148). In some embodiments, the iCAR comprises a 2xPD1(G4S) inhibitory domain (SEQ ID NO:149). In some embodiments, the iCAR comprises a 2xPD1(PD1) inhibitory domain (SEQ ID NO:150). In some embodiments, the iCAR comprises a PVRIg inhibitory domain (SEQ ID NO:151). In some embodiments, the iCAR comprises an AA2AR inhibitory domain (SEQ ID NO:152). In some embodiments, the iCAR comprises a signal peptide upstream of the iCAR portion, wherein the signal peptide is a CD8 alpha signal peptide (SEQ ID NO: 161), a GM-CSF signal peptide (SEQ ID NO: 162), or a mIgK signal peptide (SEQ ID NO: 306).

[0331] In some embodiments, the iCAR comprises an scFv component comprising the VL and VH sequences of 3PF12/B11 (SEQ ID NOs: 43 and 44). In some embodiments, the orientation of the iCAR VH and VL regions is VH-VL. In some embodiments, the orientation of the iCAR VH and VL regions is VL-VH. In some embodiments, the iCAR scFv comprises a (G4S)X3 linker (SEQ ID NO:81) linker that covalently connects the VH and the VL to form the iCAR scFv. In some embodiments, the iCAR scFv comprises a Whitlow linker (SEQ ID NO:82) linker that covalently connects the VH and the VL to form the iCAR scFv. In some embodiments, the iCAR comprises a CD8 alpha hinge domain (SEQ ID NO:84). In some embodiments, the iCAR comprises a CD28 hinge domain (SEQ ID NO:85). In some embodiments, the iCAR comprises a PD-1 hinge domain (SEQ ID NO:86). In some embodiments, the iCAR comprises a LIR1 Ig3-4 hinge domain (SEQ ID NO:87). In some embodiments, the iCAR comprises a LIR1 Ig-4 hinge domain (SEQ ID NO:88). In some embodiments, the iCAR comprises a LIR1 52 aa hinge domain (SEQ ID NO:89). In some embodiments, the iCAR comprises a LIR1 36 aa hinge domain (SEQ ID NO:90). In some embodiments, the iCAR comprises a LIR1 30 aa hinge domain (SEQ ID NO:91). In some embodiments, the iCAR comprises a LIR1 8 aa hinge domain (SEQ ID NO:92). In some embodiments, the iCAR comprises a CD33 hinge domain (SEQ ID NO:93). In some embodiments, the iCAR comprises a KIR2DL1 hinge domain (SEQ ID NO:94). In some embodiments, the iCAR comprises aLIR1 26 aa hinge domain (SEQ ID NO: 289). In some embodiments, the iCAR comprises PD-1 (47) hinge domain (SEQ ID NO: 290). In some embodiments, the iCAR comprises PD-1 (42) hinge domain (SEQ ID NO: 291). In some embodiments, the iCAR comprises PD-1 (36) hinge domain (SEQ ID NO: 292). In some embodiments, the iCAR comprises PD-1 (30) hinge domain (SEQ ID NO: 293). In some embodiments, the iCAR comprises PD-1 (26) hinge domain (SEQ ID NO: 294). In some embodiments, the iCAR comprises PD-1 (20) hinge domain (SEQ ID NO: 295). In some embodiments, the iCAR comprises a CD8 alpha transmembrane domain (SEQ ID NO:95). In some embodiments, the iCAR comprises a CD28 transmembrane domain (SEQ ID NO:96). In some embodiments, the iCAR comprises a PD-1 transmembrane domain (SEQ ID NO:97). In some embodiments, the iCAR comprises a LIR1 transmembrane domain (SEQ ID NO:98). In some embodiments, the iCAR comprises a CD33 transmembrane domain (SEQ ID NO:99). In some embodiments, the iCAR comprises a KIR2DL1 transmembrane domain (SEQ ID NO:100). In some embodiments, the iCAR comprises a PD-1 inhibitory domain (SEQ ID NO:101). In some embodiments, the iCAR comprises a KIR2DL1 inhibitory domain (SEQ ID NO:102). In some embodiments, the iCAR comprises a KIR2DL2 inhibitory domain (SEQ ID NO:103). In some embodiments, the iCAR comprises a KIR2DL3 inhibitory domain (SEQ ID NO:104). In some embodiments, the iCAR comprises a KIR2DL4 inhibitory domain (SEQ ID NO:105). In some embodiments, the iCAR comprises a KIR2DL5A inhibitory domain (SEQ ID NO:106). In some embodiments, the iCAR comprises a KIR3DL1 inhibitory domain (SEQ ID NO:107). In some embodiments, the iCAR comprises a KIR3DL2 inhibitory domain (SEQ ID NO:108). In some embodiments, the iCAR comprises a KIR3DL3 inhibitory domain (SEQ ID NO:109). In some embodiments, the iCAR comprises a LAIR1 inhibitory domain (SEQ ID NO:110). In some embodiments, the iCAR comprises a CD22 inhibitory domain (SEQ ID NO:111). In some embodiments, the iCAR comprises a CD33 inhibitory domain (SEQ ID NO:112). In some embodiments, the iCAR comprises a SIGLEC5 inhibitory domain (SEQ ID NO: 113). In some embodiments, the iCAR comprises a SIGLEC6 inhibitory domain (SEQ ID NO: 114). In some embodiments, the iCAR comprises a SIGLEC7 inhibitory domain (SEQ ID NO: 115). In some embodiments, the iCAR comprises a SIGLEC8 inhibitory domain (SEQ ID NO: 116). In some embodiments, the iCAR comprises a SIGLEC9 inhibitory domain (SEQ ID NO: 117). In some embodiments, the iCAR comprises a SIGLEC10 inhibitory domain (SEQ ID NO: 118). In some embodiments, the iCAR comprises a SIGLEC11 inhibitory domain (SEQ ID NO: 119). In some embodiments, the iCAR comprises a SIGLEC12 inhibitory domain (SEQ ID NO:120). In some embodiments, the iCAR comprises a PECAM1/CD31 inhibitory domain (SEQ ID NO:121). In some embodiments, the iCAR comprises a CD200R1 inhibitory domain (SEQ ID NO:122). In some embodiments, the iCAR comprises a FCRL1 inhibitory domain (SEQ ID NO:123). In some embodiments, the iCAR comprises a FCRL2 inhibitory domain (SEQ ID NO:124). In some embodiments, the iCAR comprises a FCRL3 inhibitory domain (SEQ ID NO:125). In some embodiments, the iCAR comprises a FCRL4 inhibitory domain (SEQ ID NO:126). In some embodiments, the iCAR comprises a FCRL5 inhibitory domain (SEQ ID NO:127). In some embodiments, the iCAR comprises a SLAMF1 inhibitory domain (SEQ ID NO:128). In some embodiments, the iCAR comprises a SLAMF5 inhibitory domain (SEQ ID NO:129). In some embodiments, the iCAR comprises a BTLA inhibitory domain (SEQ ID NO:130). In some embodiments, the iCAR comprises a LAG3 inhibitory domain (SEQ ID NO:131). In some embodiments, the iCAR comprises a 2B4 inhibitory domain (SEQ ID NO:132). In some embodiments, the iCAR comprises a CD160 inhibitory domain (SEQ ID NO:133). In some embodiments, the iCAR comprises a CEACAM1 inhibitory domain (SEQ ID NO:134). In some embodiments, the iCAR comprises a TIM3 inhibitory domain (SEQ ID NO:135). In some embodiments, the iCAR comprises a VISTA inhibitory domain (SEQ ID NO:136). In some embodiments, the iCAR comprises a TIGIT inhibitory domain (SEQ ID NO:137). In some embodiments, the iCAR comprises a SIRPalpha inhibitory domain (SEQ ID NO:138). In some embodiments, the iCAR comprises a FcγRIIB inhibitory domain (SEQ ID NO:139). In some embodiments, the iCAR comprises a CD5 inhibitory domain (SEQ ID NO:140). In some embodiments, the iCAR comprises a CD300a inhibitory domain (SEQ ID NO:141). In some embodiments, the iCAR comprises a CD300f inhibitory domain (SEQ ID NO:142). In some embodiments, the iCAR comprises a LIR1 inhibitory domain (SEQ ID NO:143). In some embodiments, the iCAR comprises a LIR2 inhibitory domain (SEQ ID NO:144). In some embodiments, the iCAR comprises a LIR3 inhibitory domain (SEQ ID NO:145). In some embodiments, the iCAR comprises a LIR5 inhibitory domain (SEQ ID NO:146). In some embodiments, the iCAR comprises a LIR8 inhibitory domain (SEQ ID NO:147). In some embodiments, the iCAR comprises a Ly9 inhibitory domain (SEQ ID NO:148). In some embodiments, the iCAR comprises a 2xPD1(G4S) inhibitory domain (SEQ ID NO:149). In some embodiments, the iCAR comprises a 2xPD1(PD1) inhibitory domain (SEQ ID NO:150). In some embodiments, the iCAR comprises a PVRIg inhibitory domain (SEQ ID NO:151). In some embodiments, the iCAR comprises an AA2AR inhibitory domain (SEQ ID NO:152). In some embodiments, the iCAR comprises a signal peptide upstream of the iCAR portion, wherein the signal peptide is a CD8 alpha signal peptide (SEQ ID NO: 161), a GM-CSF signal peptide (SEQ ID NO: 162), or a mIgK signal peptide (SEQ ID NO: 306).

[0332] In some embodiments, the iCAR comprises an scFv component comprising the VL and VH sequences of W6/32 (SEQ ID NOs: 45 and 46). In some embodiments, the orientation of the iCAR VH and VL regions is VH-VL. In some embodiments, the orientation of the iCAR VH and VL regions is VL-VH. In some embodiments, the iCAR scFv comprises a (G4S)X3 linker (SEQ ID NO:81) linker that covalently connects the VH and the VL to form the iCAR scFv. In some embodiments, the iCAR scFv comprises a Whitlow linker (SEQ ID NO:82) linker that covalently connects the VH and the VL to form the iCAR scFv. In some embodiments, the iCAR comprises a CD8 alpha hinge domain (SEQ ID NO:84). In some embodiments, the iCAR comprises a CD28 hinge domain (SEQ ID NO:85). In some embodiments, the iCAR comprises a PD-1 hinge domain (SEQ ID NO:86). In some embodiments, the iCAR comprises a LIR1 Ig3-4 hinge domain (SEQ ID NO:87). In some embodiments, the iCAR comprises a LIR1 Ig-4 hinge domain (SEQ ID NO:88). In some embodiments, the iCAR comprises a LIR1 52 aa hinge domain (SEQ ID NO:89). In some embodiments, the iCAR comprises a LIR1 36 aa hinge domain (SEQ ID NO:90). In some embodiments, the iCAR comprises a LIR1 30 aa hinge domain (SEQ ID NO:91). In some embodiments, the iCAR comprises a LIR1 8 aa hinge domain (SEQ ID NO:92). In some embodiments, the iCAR comprises a CD33 hinge domain (SEQ ID NO:93). In some embodiments, the iCAR comprises a KIR2DL1 hinge domain (SEQ ID NO:94). In some embodiments, the iCAR comprises aLIR1 26 aa hinge domain (SEQ ID NO: 289). In some embodiments, the iCAR comprises PD-1 (47) hinge domain (SEQ ID NO: 290). In some embodiments, the iCAR comprises PD-1 (42) hinge domain (SEQ ID NO: 291). In some embodiments, the iCAR comprises PD-1 (36) hinge domain (SEQ ID NO: 292). In some embodiments, the iCAR comprises PD-1 (30) hinge domain (SEQ ID NO: 293). In some embodiments, the iCAR comprises PD-1 (26) hinge domain (SEQ ID NO: 294). In some embodiments, the iCAR comprises PD-1 (20) hinge domain (SEQ ID NO: 295). In some embodiments, the iCAR comprises a CD8 alpha transmembrane domain (SEQ ID NO:95). In some embodiments, the iCAR comprises a CD28 transmembrane domain (SEQ ID NO:96). In some embodiments, the iCAR comprises a PD-1 transmembrane domain (SEQ ID NO:97). In some embodiments, the iCAR comprises a LIR1 transmembrane domain (SEQ ID NO:98). In some embodiments, the iCAR comprises a CD33 transmembrane domain (SEQ ID NO:99). In some embodiments, the iCAR comprises a KIR2DL1 transmembrane domain (SEQ ID NO:100). In some embodiments, the iCAR comprises a PD-1 inhibitory domain (SEQ ID NO:101). In some embodiments, the iCAR comprises a KIR2DL1 inhibitory domain (SEQ ID NO:102). In some embodiments, the iCAR comprises a KIR2DL2 inhibitory domain (SEQ ID NO:103). In some embodiments, the iCAR comprises a KIR2DL3 inhibitory domain (SEQ ID NO:104). In some embodiments, the iCAR comprises a KIR2DL4 inhibitory domain (SEQ ID NO:105). In some embodiments, the iCAR comprises a KIR2DL5A inhibitory domain (SEQ ID NO:106). In some embodiments, the iCAR comprises a KIR3DL1 inhibitory domain (SEQ ID NO:107). In some embodiments, the iCAR comprises a KIR3DL2 inhibitory domain (SEQ ID NO:108). In some embodiments, the iCAR comprises a KIR3DL3 inhibitory domain (SEQ ID NO:109). In some embodiments, the iCAR comprises a LAIR1 inhibitory domain (SEQ ID NO:110). In some embodiments, the iCAR comprises a CD22 inhibitory domain (SEQ ID NO:111). In some embodiments, the iCAR comprises a CD33 inhibitory domain (SEQ ID NO:112). In some embodiments, the iCAR comprises a SIGLEC5 inhibitory domain (SEQ ID NO: 113). In some embodiments, the iCAR comprises a SIGLEC6 inhibitory domain (SEQ ID NO:114). In some embodiments, the iCAR comprises a SIGLEC7 inhibitory domain (SEQ ID NO: 115). In some embodiments, the iCAR comprises a SIGLEC8 inhibitory domain (SEQ ID NO: 116). In some embodiments, the iCAR comprises a SIGLEC9 inhibitory domain (SEQ ID NO:117). In some embodiments, the iCAR comprises a SIGLEC10 inhibitory domain (SEQ ID NO: 118). In some embodiments, the iCAR comprises a SIGLEC11 inhibitory domain (SEQ ID NO: 119). In some embodiments, the iCAR comprises a SIGLEC12 inhibitory domain (SEQ ID NO:120). In some embodiments, the iCAR comprises a PECAM1/CD31 inhibitory domain (SEQ ID NO:121). In some embodiments, the iCAR comprises a CD200R1 inhibitory domain (SEQ ID NO:122). In some embodiments, the iCAR comprises a FCRL1 inhibitory domain (SEQ ID NO:123). In some embodiments, the iCAR comprises a FCRL2 inhibitory domain (SEQ ID NO:124). In some embodiments, the iCAR comprises a FCRL3 inhibitory domain (SEQ ID NO:125). In some embodiments, the iCAR comprises a FCRL4 inhibitory domain (SEQ ID NO:126). In some embodiments, the iCAR comprises a FCRL5 inhibitory domain (SEQ ID NO:127). In some embodiments, the iCAR comprises a SLAMF1 inhibitory domain (SEQ ID NO:128). In some embodiments, the iCAR comprises a SLAMF5 inhibitory domain (SEQ ID NO:129). In some embodiments, the iCAR comprises a BTLA inhibitory domain (SEQ ID NO:130). In some embodiments, the iCAR comprises a LAG3 inhibitory domain (SEQ ID NO:131). In some embodiments, the iCAR comprises a 2B4 inhibitory domain (SEQ ID NO:132). In some embodiments, the iCAR comprises a CD160 inhibitory domain (SEQ ID NO:133). In some embodiments, the iCAR comprises a CEACAM1 inhibitory domain (SEQ ID NO:134). In some embodiments, the iCAR comprises a TIM3 inhibitory domain (SEQ ID NO:135). In some embodiments, the iCAR comprises a VISTA inhibitory domain (SEQ ID NO:136). In some embodiments, the iCAR comprises a TIGIT inhibitory domain (SEQ ID NO:137). In some embodiments, the iCAR comprises a SIRPalpha inhibitory domain (SEQ ID NO:138). In some embodiments, the iCAR comprises a FcγRIIB inhibitory domain (SEQ ID NO:139). In some embodiments, the iCAR comprises a CD5 inhibitory domain (SEQ ID NO:140). In some embodiments, the iCAR comprises a CD300a inhibitory domain (SEQ ID NO:141). In some embodiments, the iCAR comprises a CD300f inhibitory domain (SEQ ID NO:142). In some embodiments, the iCAR comprises a LIR1 inhibitory domain (SEQ ID NO:143). In some embodiments, the iCAR comprises a LIR2 inhibitory domain (SEQ ID NO:144). In some embodiments, the iCAR comprises a LIR3 inhibitory domain (SEQ ID NO:145). In some embodiments, the iCAR comprises a LIR5 inhibitory domain (SEQ ID NO:146). In some embodiments, the iCAR comprises a LIR8 inhibitory domain (SEQ ID NO:147). In some embodiments, the iCAR comprises a Ly9 inhibitory domain (SEQ ID NO:148). In some embodiments, the iCAR comprises a 2xPD1(G4S) inhibitory domain (SEQ ID NO:149). In some embodiments, the iCAR comprises a 2xPD1(PD1) inhibitory domain (SEQ ID NO:150). In some embodiments, the iCAR comprises a PVRIg inhibitory domain (SEQ ID NO:151). In some embodiments, the iCAR comprises an AA2AR inhibitory domain (SEQ ID NO:152). In some embodiments, the iCAR comprises a signal peptide upstream of the iCAR portion, wherein the signal peptide is a CD8 alpha signal peptide (SEQ ID NO: 161), a GM-CSF signal peptide (SEQ ID NO: 162), or a mIgK signal peptide (SEQ ID NO: 306).

[0333] In some embodiments, the iCAR comprises an scFv component comprising the VL and VH sequences of BBM.1 (SEQ ID NOs: 47 and 48). In some embodiments, the orientation of the iCAR VH and VL regions is VH-VL. In some embodiments, the orientation of the iCAR VH and VL regions is VL-VH. In some embodiments, the iCAR scFv comprises a (G4S)X3 linker (SEQ ID NO:81) linker that covalently connects the VH and the VL to form the iCAR scFv. In some embodiments, the iCAR scFv comprises a Whitlow linker (SEQ ID NO:82) linker that covalently connects the VH and the VL to form the iCAR scFv. In some embodiments, the iCAR comprises a CD8 alpha hinge domain (SEQ ID NO:84). In some embodiments, the iCAR comprises a CD28 hinge domain (SEQ ID NO:85). In some embodiments, the iCAR comprises a PD-1 hinge domain (SEQ ID NO:86). In some embodiments, the iCAR comprises a LIR1 Ig3-4 hinge domain (SEQ ID NO:87). In some embodiments, the iCAR comprises a LIR1 Ig-4 hinge domain (SEQ ID NO:88). In some embodiments, the iCAR comprises a LIR1 52 aa hinge domain (SEQ ID NO:89). In some embodiments, the iCAR comprises a LIR1 36 aa hinge domain (SEQ ID NO:90). In some embodiments, the iCAR comprises a LIR1 30 aa hinge domain (SEQ ID NO:91). In some embodiments, the iCAR comprises a LIR1 8 aa hinge domain (SEQ ID NO:92). In some embodiments, the iCAR comprises a CD33 hinge domain (SEQ ID NO:93). In some embodiments, the iCAR comprises a KIR2DL1 hinge domain (SEQ ID NO:94). In some embodiments, the iCAR comprises aLIR1 26 aa hinge domain (SEQ ID NO: 289). In some embodiments, the iCAR comprises PD-1 (47) hinge domain (SEQ ID NO: 290). In some embodiments, the iCAR comprises PD-1 (42) hinge domain (SEQ ID NO: 291). In some embodiments, the iCAR comprises PD-1 (36) hinge domain (SEQ ID NO: 292). In some embodiments, the iCAR comprises PD-1 (30) hinge domain (SEQ ID NO: 293). In some embodiments, the iCAR comprises PD-1 (26) hinge domain (SEQ ID NO: 294). In some embodiments, the iCAR comprises PD-1 (20) hinge domain (SEQ ID NO: 295). In some embodiments, the iCAR comprises a CD8 alpha transmembrane domain (SEQ ID NO:95). In some embodiments, the iCAR comprises a CD28 transmembrane domain (SEQ ID NO:96). In some embodiments, the iCAR comprises a PD-1 transmembrane domain (SEQ ID NO:97). In some embodiments, the iCAR comprises a LIR1 transmembrane domain (SEQ ID NO:98). In some embodiments, the iCAR comprises a CD33 transmembrane domain (SEQ ID NO:99). In some embodiments, the iCAR comprises a KIR2DL1 transmembrane domain (SEQ ID NO:100). In some embodiments, the iCAR comprises a PD-1 inhibitory domain (SEQ ID NO:101). In some embodiments, the iCAR comprises a KIR2DL1 inhibitory domain (SEQ ID NO:102). In some embodiments, the iCAR comprises a KIR2DL2 inhibitory domain (SEQ ID NO:103). In some embodiments, the iCAR comprises a KIR2DL3 inhibitory domain (SEQ ID NO:104). In some embodiments, the iCAR comprises a KIR2DL4 inhibitory domain (SEQ ID NO:105). In some embodiments, the iCAR comprises a KIR2DL5A inhibitory domain (SEQ ID NO:106). In some embodiments, the iCAR comprises a KIR3DL1 inhibitory domain (SEQ ID NO:107). In some embodiments, the iCAR comprises a KIR3DL2 inhibitory domain (SEQ ID NO:108). In some embodiments, the iCAR comprises a KIR3DL3 inhibitory domain (SEQ ID NO:109). In some embodiments, the iCAR comprises a LAIR1 inhibitory domain (SEQ ID NO:110). In some embodiments, the iCAR comprises a CD22 inhibitory domain (SEQ ID NO:111). In some embodiments, the iCAR comprises a CD33 inhibitory domain (SEQ ID NO:112). In some embodiments, the iCAR comprises a SIGLEC5 inhibitory domain (SEQ ID NO: 113). In some embodiments, the iCAR comprises a SIGLEC6 inhibitory domain (SEQ ID NO: 114). In some embodiments, the iCAR comprises a SIGLEC7 inhibitory domain (SEQ ID NO: 115). In some embodiments, the iCAR comprises a SIGLEC8 inhibitory domain (SEQ ID NO: 116). In some embodiments, the iCAR comprises a SIGLEC9 inhibitory domain (SEQ ID NO: 117). In some embodiments, the iCAR comprises a SIGLEC10 inhibitory domain (SEQ ID NO: 118). In some embodiments, the iCAR comprises a SIGLEC11 inhibitory domain (SEQ ID NO: 119). In some embodiments, the iCAR comprises a SIGLEC12 inhibitory domain (SEQ ID NO:120). In some embodiments, the iCAR comprises a PECAM1/CD31 inhibitory domain (SEQ ID NO:121). In some embodiments, the iCAR comprises a CD200R1 inhibitory domain (SEQ ID NO:122). In some embodiments, the iCAR comprises a FCRL1 inhibitory domain (SEQ ID NO:123). In some embodiments, the iCAR comprises a FCRL2 inhibitory domain (SEQ ID NO:124). In some embodiments, the iCAR comprises a FCRL3 inhibitory domain (SEQ ID NO:125). In some embodiments, the iCAR comprises a FCRL4 inhibitory domain (SEQ ID NO:126). In some embodiments, the iCAR comprises a FCRL5 inhibitory domain (SEQ ID NO:127). In some embodiments, the iCAR comprises a SLAMF1 inhibitory domain (SEQ ID NO:128). In some embodiments, the iCAR comprises a SLAMF5 inhibitory domain (SEQ ID NO:129). In some embodiments, the iCAR comprises a BTLA inhibitory domain (SEQ ID NO:130). In some embodiments, the iCAR comprises a LAG3 inhibitory domain (SEQ ID NO:131). In some embodiments, the iCAR comprises a 2B4 inhibitory domain (SEQ ID NO:132). In some embodiments, the iCAR comprises a CD160 inhibitory domain (SEQ ID NO:133). In some embodiments, the iCAR comprises a CEACAM1 inhibitory domain (SEQ ID NO:134). In some embodiments, the iCAR comprises a TIM3 inhibitory domain (SEQ ID NO:135). In some embodiments, the iCAR comprises a VISTA inhibitory domain (SEQ ID NO:136). In some embodiments, the iCAR comprises a TIGIT inhibitory domain (SEQ ID NO:137). In some embodiments, the iCAR comprises a SIRPalpha inhibitory domain (SEQ ID NO:138). In some embodiments, the iCAR comprises a FcγRIIB inhibitory domain (SEQ ID NO:139). In some embodiments, the iCAR comprises a CD5 inhibitory domain (SEQ ID NO:140). In some embodiments, the iCAR comprises a CD300a inhibitory domain (SEQ ID NO:141). In some embodiments, the iCAR comprises a CD300f inhibitory domain (SEQ ID NO:142). In some embodiments, the iCAR comprises a LIR1 inhibitory domain (SEQ ID NO:143). In some embodiments, the iCAR comprises a LIR2 inhibitory domain (SEQ ID NO:144). In some embodiments, the iCAR comprises a LIR3 inhibitory domain (SEQ ID NO:145). In some embodiments, the iCAR comprises a LIR5 inhibitory domain (SEQ ID NO:146). In some embodiments, the iCAR comprises a LIR8 inhibitory domain (SEQ ID NO:147). In some embodiments, the iCAR comprises a Ly9 inhibitory domain (SEQ ID NO:148). In some embodiments, the iCAR comprises a 2xPD1(G4S) inhibitory domain (SEQ ID NO:149). In some embodiments, the iCAR comprises a 2xPD1(PD1) inhibitory domain (SEQ ID NO:150). In some embodiments, the iCAR comprises a PVRIg inhibitory domain (SEQ ID NO:151). In some embodiments, the iCAR comprises an AA2AR inhibitory domain (SEQ ID NO:152). In some embodiments, the iCAR comprises a signal peptide upstream of the iCAR portion, wherein the signal peptide is a CD8 alpha signal peptide (SEQ ID NO: 161), a GM-CSF signal peptide (SEQ ID NO: 162), or a mIgK signal peptide (SEQ ID NO: 306).

[0334] In some embodiments, the iCAR comprises an scFv component comprising the VL and VH sequences of SN66E3.1 (SEQ ID NOs: 49 and 50). In some embodiments, the orientation of the iCAR VH and VL regions is VH-VL. In some embodiments, the orientation of the iCAR VH and VL regions is VL-VH. In some embodiments, the iCAR scFv comprises a (G4S)X3 linker (SEQ ID NO:81) linker that covalently connects the VH and the VL to form the iCAR scFv. In some embodiments, the iCAR scFv comprises a Whitlow linker (SEQ ID NO:82) linker that covalently connects the VH and the VL to form the iCAR scFv. In some embodiments, the iCAR comprises a CD8 alpha hinge domain (SEQ ID NO:84). In some embodiments, the iCAR comprises a CD28 hinge domain (SEQ ID NO:85). In some embodiments, the iCAR comprises a PD-1 hinge domain (SEQ ID NO:86). In some embodiments, the iCAR comprises a LIR1 Ig3-4 hinge domain (SEQ ID NO:87). In some embodiments, the iCAR comprises a LIR1 Ig-4 hinge domain (SEQ ID NO:88). In some embodiments, the iCAR comprises a LIR1 52 aa hinge domain (SEQ ID NO:89). In some embodiments, the iCAR comprises a LIR1 36 aa hinge domain (SEQ ID NO:90). In some embodiments, the iCAR comprises a LIR1 30 aa hinge domain (SEQ ID NO:91). In some embodiments, the iCAR comprises a LIR1 8 aa hinge domain (SEQ ID NO:92). In some embodiments, the iCAR comprises a CD33 hinge domain (SEQ ID NO:93). In some embodiments, the iCAR comprises a KIR2DL1 hinge domain (SEQ ID NO:94). In some embodiments, the iCAR comprises aLIR1 26 aa hinge domain (SEQ ID NO: 289). In some embodiments, the iCAR comprises PD-1 (47) hinge domain (SEQ ID NO: 290). In some embodiments, the iCAR comprises PD-1 (42) hinge domain (SEQ ID NO: 291). In some embodiments, the iCAR comprises PD-1 (36) hinge domain (SEQ ID NO: 292). In some embodiments, the iCAR comprises PD-1 (30) hinge domain (SEQ ID NO: 293). In some embodiments, the iCAR comprises PD-1 (26) hinge domain (SEQ ID NO: 294). In some embodiments, the iCAR comprises PD-1 (20) hinge domain (SEQ ID NO: 295). In some embodiments, the iCAR comprises a CD8 alpha transmembrane domain (SEQ ID NO:95). In some embodiments, the iCAR comprises a CD28 transmembrane domain (SEQ ID NO:96). In some embodiments, the iCAR comprises a PD-1 transmembrane domain (SEQ ID NO:97). In some embodiments, the iCAR comprises a LIR1 transmembrane domain (SEQ ID NO:98). In some embodiments, the iCAR comprises a CD33 transmembrane domain (SEQ ID NO:99). In some embodiments, the iCAR comprises a KIR2DL1 transmembrane domain (SEQ ID NO:100). In some embodiments, the iCAR comprises a PD-1 inhibitory domain (SEQ ID NO:101). In some embodiments, the iCAR comprises a KIR2DL1 inhibitory domain (SEQ ID NO:102). In some embodiments, the iCAR comprises a KIR2DL2 inhibitory domain (SEQ ID NO:103). In some embodiments, the iCAR comprises a KIR2DL3 inhibitory domain (SEQ ID NO:104). In some embodiments, the iCAR comprises a KIR2DL4 inhibitory domain (SEQ ID NO:105). In some embodiments, the iCAR comprises a KIR2DL5A inhibitory domain (SEQ ID NO:106). In some embodiments, the iCAR comprises a KIR3DL1 inhibitory domain (SEQ ID NO:107). In some embodiments, the iCAR comprises a KIR3DL2 inhibitory domain (SEQ ID NO:108). In some embodiments, the iCAR comprises a KIR3DL3 inhibitory domain (SEQ ID NO:109). In some embodiments, the iCAR comprises a LAIR1 inhibitory domain (SEQ ID NO:110). In some embodiments, the iCAR comprises a CD22 inhibitory domain (SEQ ID NO:111). In some embodiments, the iCAR comprises a CD33 inhibitory domain (SEQ ID NO:112). In some embodiments, the iCAR comprises a SIGLEC5 inhibitory domain (SEQ ID NO: 113). In some embodiments, the iCAR comprises a SIGLEC6 inhibitory domain (SEQ ID NO:114). In some embodiments, the iCAR comprises a SIGLEC7 inhibitory domain (SEQ ID NO: 115). In some embodiments, the iCAR comprises a SIGLEC8 inhibitory domain (SEQ ID NO: 116). In some embodiments, the iCAR comprises a SIGLEC9 inhibitory domain (SEQ ID NO:117). In some embodiments, the iCAR comprises a SIGLEC10 inhibitory domain (SEQ ID NO: 118). In some embodiments, the iCAR comprises a SIGLEC11 inhibitory domain (SEQ ID NO: 119). In some embodiments, the iCAR comprises a SIGLEC12 inhibitory domain (SEQ ID NO:120). In some embodiments, the iCAR comprises a PECAM1/CD31 inhibitory domain (SEQ ID NO:121). In some embodiments, the iCAR comprises a CD200R1 inhibitory domain (SEQ ID NO:122). In some embodiments, the iCAR comprises a FCRL1 inhibitory domain (SEQ ID NO:123). In some embodiments, the iCAR comprises a FCRL2 inhibitory domain (SEQ ID NO:124). In some embodiments, the iCAR comprises a FCRL3 inhibitory domain (SEQ ID NO:125). In some embodiments, the iCAR comprises a FCRL4 inhibitory domain (SEQ ID NO:126). In some embodiments, the iCAR comprises a FCRL5 inhibitory domain (SEQ ID NO:127). In some embodiments, the iCAR comprises a SLAMF1 inhibitory domain (SEQ ID NO:128). In some embodiments, the iCAR comprises a SLAMF5 inhibitory domain (SEQ ID NO:129). In some embodiments, the iCAR comprises a BTLA inhibitory domain (SEQ ID NO:130). In some embodiments, the iCAR comprises a LAG3 inhibitory domain (SEQ ID NO:131). In some embodiments, the iCAR comprises a 2B4 inhibitory domain (SEQ ID NO:132). In some embodiments, the iCAR comprises a CD160 inhibitory domain (SEQ ID NO:133). In some embodiments, the iCAR comprises a CEACAM1 inhibitory domain (SEQ ID NO:134). In some embodiments, the iCAR comprises a TIM3 inhibitory domain (SEQ ID NO:135). In some embodiments, the iCAR comprises a VISTA inhibitory domain (SEQ ID NO:136). In some embodiments, the iCAR comprises a TIGIT inhibitory domain (SEQ ID NO:137). In some embodiments, the iCAR comprises a SIRPalpha inhibitory domain (SEQ ID NO:138). In some embodiments, the iCAR comprises a FcβRIIB inhibitory domain (SEQ ID NO:139). In some embodiments, the iCAR comprises a CD5 inhibitory domain (SEQ ID NO:140). In some embodiments, the iCAR comprises a CD300a inhibitory domain (SEQ ID NO:141). In some embodiments, the iCAR comprises a CD300f inhibitory domain (SEQ ID NO:142). In some embodiments, the iCAR comprises a LIR1 inhibitory domain (SEQ ID NO:143). In some embodiments, the iCAR comprises a LIR2 inhibitory domain (SEQ ID NO:144). In some embodiments, the iCAR comprises a LIR3 inhibitory domain (SEQ ID NO:145). In some embodiments, the iCAR comprises a LIR5 inhibitory domain (SEQ ID NO:146). In some embodiments, the iCAR comprises a LIR8 inhibitory domain (SEQ ID NO:147). In some embodiments, the iCAR comprises a Ly9 inhibitory domain (SEQ ID NO:148). In some embodiments, the iCAR comprises a 2xPD1(G4S) inhibitory domain (SEQ ID NO:149). In some embodiments, the iCAR comprises a 2xPD1(PD1) inhibitory domain (SEQ ID NO:150). In some embodiments, the iCAR comprises a PVRIg inhibitory domain (SEQ ID NO:151). In some embodiments, the iCAR comprises an AA2AR inhibitory domain (SEQ ID NO:152). In some embodiments, the iCAR comprises a signal peptide upstream of the iCAR portion, wherein the signal peptide is a CD8 alpha signal peptide (SEQ ID NO: 161), a GM-CSF signal peptide (SEQ ID NO: 162), or a mIgK signal peptide (SEQ ID NO: 306).

[0335] In some embodiments, the iCAR comprises an scFv component comprising the VL and VH sequences of Ha5C2.A2 (SEQ ID NOs: 51 and 52). In some embodiments, the orientation of the iCAR VH and VL regions is VH-VL. In some embodiments, the orientation of the iCAR VH and VL regions is VL-VH. In some embodiments, the iCAR scFv comprises a (G4S)X3 linker (SEQ ID NO:81) linker that covalently connects the VH and the VL to form the iCAR scFv. In some embodiments, the iCAR scFv comprises a Whitlow linker (SEQ ID NO:82) linker that covalently connects the VH and the VL to form the iCAR scFv. In some embodiments, the iCAR comprises a CD8 alpha hinge domain (SEQ ID NO:84). In some embodiments, the iCAR comprises a CD28 hinge domain (SEQ ID NO:85). In some embodiments, the iCAR comprises a PD-1 hinge domain (SEQ ID NO:86). In some embodiments, the iCAR comprises a LIR1 Ig3-4 hinge domain (SEQ ID NO:87). In some embodiments, the iCAR comprises a LIR1 Ig-4 hinge domain (SEQ ID NO:88). In some embodiments, the iCAR comprises a LIR1 52 aa hinge domain (SEQ ID NO:89). In some embodiments, the iCAR comprises a LIR1 36 aa hinge domain (SEQ ID NO:90). In some embodiments, the iCAR comprises a LIR1 30 aa hinge domain (SEQ ID NO:91). In some embodiments, the iCAR comprises a LIR1 8 aa hinge domain (SEQ ID NO:92). In some embodiments, the iCAR comprises a CD33 hinge domain (SEQ ID NO:93). In some embodiments, the iCAR comprises a KIR2DL1 hinge domain (SEQ ID NO:94). In some embodiments, the iCAR comprises aLIR1 26 aa hinge domain (SEQ ID NO: 289). In some embodiments, the iCAR comprises PD-1 (47) hinge domain (SEQ ID NO: 290). In some embodiments, the iCAR comprises PD-1 (42) hinge domain (SEQ ID NO: 291). In some embodiments, the iCAR comprises PD-1 (36) hinge domain (SEQ ID NO: 292). In some embodiments, the iCAR comprises PD-1 (30) hinge domain (SEQ ID NO: 293). In some embodiments, the iCAR comprises PD-1 (26) hinge domain (SEQ ID NO: 294). In some embodiments, the iCAR comprises PD-1 (20) hinge domain (SEQ ID NO: 295). In some embodiments, the iCAR comprises a CD8 alpha transmembrane domain (SEQ ID NO:95). In some embodiments, the iCAR comprises a CD28 transmembrane domain (SEQ ID NO:96). In some embodiments, the iCAR comprises a PD-1 transmembrane domain (SEQ ID NO:97). In some embodiments, the iCAR comprises a LIR1 transmembrane domain (SEQ ID NO:98). In some embodiments, the iCAR comprises a CD33 transmembrane domain (SEQ ID NO:99). In some embodiments, the iCAR comprises a KIR2DL1 transmembrane domain (SEQ ID NO:100). In some embodiments, the iCAR comprises a PD-1 inhibitory domain (SEQ ID NO:101). In some embodiments, the iCAR comprises a KIR2DL1 inhibitory domain (SEQ ID NO:102). In some embodiments, the iCAR comprises a KIR2DL2 inhibitory domain (SEQ ID NO:103). In some embodiments, the iCAR comprises a KIR2DL3 inhibitory domain (SEQ ID NO:104). In some embodiments, the iCAR comprises a KIR2DL4 inhibitory domain (SEQ ID NO:105). In some embodiments, the iCAR comprises a KIR2DL5A inhibitory domain (SEQ ID NO:106). In some embodiments, the iCAR comprises a KIR3DL1 inhibitory domain (SEQ ID NO:107). In some embodiments, the iCAR comprises a KIR3DL2 inhibitory domain (SEQ ID NO:108). In some embodiments, the iCAR comprises a KIR3DL3 inhibitory domain (SEQ ID NO:109). In some embodiments, the iCAR comprises a LAIR1 inhibitory domain (SEQ ID NO:110). In some embodiments, the iCAR comprises a CD22 inhibitory domain (SEQ ID NO:111). In some embodiments, the iCAR comprises a CD33 inhibitory domain (SEQ ID NO:112). In some embodiments, the iCAR comprises a SIGLEC5 inhibitory domain (SEQ ID NO: 113). In some embodiments, the iCAR comprises a SIGLEC6 inhibitory domain (SEQ ID NO: 114). In some embodiments, the iCAR comprises a SIGLEC7 inhibitory domain (SEQ ID NO: 115). In some embodiments, the iCAR comprises a SIGLEC8 inhibitory domain (SEQ ID NO: 116). In some embodiments, the iCAR comprises a SIGLEC9 inhibitory domain (SEQ ID NO: 117). In some embodiments, the iCAR comprises a SIGLEC10 inhibitory domain (SEQ ID NO: 118). In some embodiments, the iCAR comprises a SIGLEC11 inhibitory domain (SEQ ID NO: 119). In some embodiments, the iCAR comprises a SIGLEC12 inhibitory domain (SEQ ID NO:120). In some embodiments, the iCAR comprises a PECAM1/CD31 inhibitory domain (SEQ ID NO:121). In some embodiments, the iCAR comprises a CD200R1 inhibitory domain (SEQ ID NO:122). In some embodiments, the iCAR comprises a FCRL1 inhibitory domain (SEQ ID NO:123). In some embodiments, the iCAR comprises a FCRL2 inhibitory domain (SEQ ID NO:124). In some embodiments, the iCAR comprises a FCRL3 inhibitory domain (SEQ ID NO:125). In some embodiments, the iCAR comprises a FCRL4 inhibitory domain (SEQ ID NO:126). In some embodiments, the iCAR comprises a FCRL5 inhibitory domain (SEQ ID NO:127). In some embodiments, the iCAR comprises a SLAMF1 inhibitory domain (SEQ ID NO:128). In some embodiments, the iCAR comprises a SLAMF5 inhibitory domain (SEQ ID NO:129). In some embodiments, the iCAR comprises a BTLA inhibitory domain (SEQ ID NO:130). In some embodiments, the iCAR comprises a LAG3 inhibitory domain (SEQ ID NO:131). In some embodiments, the iCAR comprises a 2B4 inhibitory domain (SEQ ID NO:132). In some embodiments, the iCAR comprises a CD160 inhibitory domain (SEQ ID NO:133). In some embodiments, the iCAR comprises a CEACAM1 inhibitory domain (SEQ ID NO:134). In some embodiments, the iCAR comprises a TIM3 inhibitory domain (SEQ ID NO:135). In some embodiments, the iCAR comprises a VISTA inhibitory domain (SEQ ID NO:136). In some embodiments, the iCAR comprises a TIGIT inhibitory domain (SEQ ID NO:137). In some embodiments, the iCAR comprises a SIRPalpha inhibitory domain (SEQ ID NO:138). In some embodiments, the iCAR comprises a FcγRIIB inhibitory domain (SEQ ID NO:139). In some embodiments, the iCAR comprises a CD5 inhibitory domain (SEQ ID NO:140). In some embodiments, the iCAR comprises a CD300a inhibitory domain (SEQ ID NO:141). In some embodiments, the iCAR comprises a CD300f inhibitory domain (SEQ ID NO:142). In some embodiments, the iCAR comprises a LIR1 inhibitory domain (SEQ ID NO:143). In some embodiments, the iCAR comprises a LIR2 inhibitory domain (SEQ ID NO:144). In some embodiments, the iCAR comprises a LIR3 inhibitory domain (SEQ ID NO:145). In some embodiments, the iCAR comprises a LIR5 inhibitory domain (SEQ ID NO:146). In some embodiments, the iCAR comprises a LIR8 inhibitory domain (SEQ ID NO:147). In some embodiments, the iCAR comprises a Ly9 inhibitory domain (SEQ ID NO:148). In some embodiments, the iCAR comprises a 2xPD1(G4S) inhibitory domain (SEQ ID NO:149). In some embodiments, the iCAR comprises a 2xPD1(PD1) inhibitory domain (SEQ ID NO:150). In some embodiments, the iCAR comprises a PVRIg inhibitory domain (SEQ ID NO:151). In some embodiments, the iCAR comprises an AA2AR inhibitory domain (SEQ ID NO:152). In some embodiments, the iCAR comprises a signal peptide upstream of the iCAR portion, wherein the signal peptide is a CD8 alpha signal peptide (SEQ ID NO: 161), a GM-CSF signal peptide (SEQ ID NO: 162), or a mIgK signal peptide (SEQ ID NO: 306).

[0336] In some embodiments, the iCAR comprises an scFv component comprising the VL and VH sequences of MWB1 (SEQ ID NOs: 53 and 54). In some embodiments, the orientation of the iCAR VH and VL regions is VH-VL. In some embodiments, the orientation of the iCAR VH and VL regions is VL-VH. In some embodiments, the iCAR scFv comprises a (G4S)X3 linker (SEQ ID NO:81) linker that covalently connects the VH and the VL to form the iCAR scFv. In some embodiments, the iCAR scFv comprises a Whitlow linker (SEQ ID NO:82) linker that covalently connects the VH and the VL to form the iCAR scFv. In some embodiments, the iCAR comprises a CD8 alpha hinge domain (SEQ ID NO:84). In some embodiments, the iCAR comprises a CD28 hinge domain (SEQ ID NO:85). In some embodiments, the iCAR comprises a PD-1 hinge domain (SEQ ID NO:86). In some embodiments, the iCAR comprises a LIR1 Ig3-4 hinge domain (SEQ ID NO:87). In some embodiments, the iCAR comprises a LIR1 Ig-4 hinge domain (SEQ ID NO:88). In some embodiments, the iCAR comprises a LIR1 52 aa hinge domain (SEQ ID NO:89). In some embodiments, the iCAR comprises a LIR1 36 aa hinge domain (SEQ ID NO:90). In some embodiments, the iCAR comprises a LIR1 30 aa hinge domain (SEQ ID NO:91). In some embodiments, the iCAR comprises a LIR1 8 aa hinge domain (SEQ ID NO:92). In some embodiments, the iCAR comprises a CD33 hinge domain (SEQ ID NO:93). In some embodiments, the iCAR comprises a KIR2DL1 hinge domain (SEQ ID NO:94). In some embodiments, the iCAR comprises aLIR1 26 aa hinge domain (SEQ ID NO: 289). In some embodiments, the iCAR comprises PD-1 (47) hinge domain (SEQ ID NO: 290). In some embodiments, the iCAR comprises PD-1 (42) hinge domain (SEQ ID NO: 291). In some embodiments, the iCAR comprises PD-1 (36) hinge domain (SEQ ID NO: 292). In some embodiments, the iCAR comprises PD-1 (30) hinge domain (SEQ ID NO: 293). In some embodiments, the iCAR comprises PD-1 (26) hinge domain (SEQ ID NO: 294). In some embodiments, the iCAR comprises PD-1 (20) hinge domain (SEQ ID NO: 295). In some embodiments, the iCAR comprises a CD8 alpha transmembrane domain (SEQ ID NO:95). In some embodiments, the iCAR comprises a CD28 transmembrane domain (SEQ ID NO:96). In some embodiments, the iCAR comprises a PD-1 transmembrane domain (SEQ ID NO:97). In some embodiments, the iCAR comprises a LIR1 transmembrane domain (SEQ ID NO:98). In some embodiments, the iCAR comprises a CD33 transmembrane domain (SEQ ID NO:99). In some embodiments, the iCAR comprises a KIR2DL1 transmembrane domain (SEQ ID NO:100). In some embodiments, the iCAR comprises a PD-1 inhibitory domain (SEQ ID NO:101). In some embodiments, the iCAR comprises a KIR2DL1 inhibitory domain (SEQ ID NO:102). In some embodiments, the iCAR comprises a KIR2DL2 inhibitory domain (SEQ ID NO:103). In some embodiments, the iCAR comprises a KIR2DL3 inhibitory domain (SEQ ID NO:104). In some embodiments, the iCAR comprises a KIR2DL4 inhibitory domain (SEQ ID NO:105). In some embodiments, the iCAR comprises a KIR2DL5A inhibitory domain (SEQ ID NO:106). In some embodiments, the iCAR comprises a KIR3DL1 inhibitory domain (SEQ ID NO:107). In some embodiments, the iCAR comprises a KIR3DL2 inhibitory domain (SEQ ID NO:108). In some embodiments, the iCAR comprises a KIR3DL3 inhibitory domain (SEQ ID NO:109). In some embodiments, the iCAR comprises a LAIR1 inhibitory domain (SEQ ID NO:110). In some embodiments, the iCAR comprises a CD22 inhibitory domain (SEQ ID NO: 111). In some embodiments, the iCAR comprises a CD33 inhibitory domain (SEQ ID NO:112). In some embodiments, the iCAR comprises a SIGLEC5 inhibitory domain (SEQ ID NO: 113). In some embodiments, the iCAR comprises a SIGLEC6 inhibitory domain (SEQ ID NO:114). In some embodiments, the iCAR comprises a SIGLEC7 inhibitory domain (SEQ ID NO: 115). In some embodiments, the iCAR comprises a SIGLEC8 inhibitory domain (SEQ ID NO: 116). In some embodiments, the iCAR comprises a SIGLEC9 inhibitory domain (SEQ ID NO: 117). In some embodiments, the iCAR comprises a SIGLEC10 inhibitory domain (SEQ ID NO: 118). In some embodiments, the iCAR comprises a SIGLEC11 inhibitory domain (SEQ ID NO: 119). In some embodiments, the iCAR comprises a SIGLEC12 inhibitory domain (SEQ ID NO:120). In some embodiments, the iCAR comprises a PECAM1/CD31 inhibitory domain (SEQ ID NO:121). In some embodiments, the iCAR comprises a CD200R1 inhibitory domain (SEQ ID NO:122). In some embodiments, the iCAR comprises a FCRL1 inhibitory domain (SEQ ID NO:123). In some embodiments, the iCAR comprises a FCRL2 inhibitory domain (SEQ ID NO:124). In some embodiments, the iCAR comprises a FCRL3 inhibitory domain (SEQ ID NO:125). In some embodiments, the iCAR comprises a FCRL4 inhibitory domain (SEQ ID NO:126). In some embodiments, the iCAR comprises a FCRL5 inhibitory domain (SEQ ID NO:127). In some embodiments, the iCAR comprises a SLAMF1 inhibitory domain (SEQ ID NO:128). In some embodiments, the iCAR comprises a SLAMF5 inhibitory domain (SEQ ID NO:129). In some embodiments, the iCAR comprises a BTLA inhibitory domain (SEQ ID NO:130). In some embodiments, the iCAR comprises a LAG3 inhibitory domain (SEQ ID NO:131). In some embodiments, the iCAR comprises a 2B4 inhibitory domain (SEQ ID NO:132). In some embodiments, the iCAR comprises a CD160 inhibitory domain (SEQ ID NO:133). In some embodiments, the iCAR comprises a CEACAM1 inhibitory domain (SEQ ID NO:134). In some embodiments, the iCAR comprises a TIM3 inhibitory domain (SEQ ID NO:135). In some embodiments, the iCAR comprises a VISTA inhibitory domain (SEQ ID NO:136). In some embodiments, the iCAR comprises a TIGIT inhibitory domain (SEQ ID NO:137). In some embodiments, the iCAR comprises a SIRPalpha inhibitory domain (SEQ ID NO:138). In some embodiments, the iCAR comprises a FcγRIIB inhibitory domain (SEQ ID NO:139). In some embodiments, the iCAR comprises a CD5 inhibitory domain (SEQ ID NO:140). In some embodiments, the iCAR comprises a CD300a inhibitory domain (SEQ ID NO:141). In some embodiments, the iCAR comprises a CD300f inhibitory domain (SEQ ID NO:142). In some embodiments, the iCAR comprises a LIR1 inhibitory domain (SEQ ID NO:143). In some embodiments, the iCAR comprises a LIR2 inhibitory domain (SEQ ID NO:144). In some embodiments, the iCAR comprises a LIR3 inhibitory domain (SEQ ID NO:145). In some embodiments, the iCAR comprises a LIR5 inhibitory domain (SEQ ID NO:146). In some embodiments, the iCAR comprises a LIR8 inhibitory domain (SEQ ID NO:147). In some embodiments, the iCAR comprises a Ly9 inhibitory domain (SEQ ID NO:148). In some embodiments, the iCAR comprises a 2xPD1(G4S) inhibitory domain (SEQ ID NO:149). In some embodiments, the iCAR comprises a 2xPD1(PD1) inhibitory domain (SEQ ID NO:150). In some embodiments, the iCAR comprises a PVRIg inhibitory domain (SEQ ID NO:151). In some embodiments, the iCAR comprises an AA2AR inhibitory domain (SEQ ID NO:152). In some embodiments, the iCAR comprises a signal peptide upstream of the iCAR portion, wherein the signal peptide is a CD8 alpha signal peptide (SEQ ID NO: 161), a GM-CSF signal peptide (SEQ ID NO: 162), or a mIgK signal peptide (SEQ ID NO: 306).

[0337] In some embodiments, the iCAR comprises an scFv component comprising the VL and VH sequences of MWB1-mod (MWB1.1) (SEQ ID NOs: 55 and 56). In some embodiments, the orientation of the iCAR VH and VL regions is VH-VL. In some embodiments, the orientation of the iCAR VH and VL regions is VL-VH. In some embodiments, the iCAR scFv comprises a (G4S)X3 linker (SEQ ID NO:81) linker that covalently connects the VH and the VL to form the iCAR scFv. In some embodiments, the iCAR scFv comprises a Whitlow linker (SEQ ID NO:82) linker that covalently connects the VH and the VL to form the iCAR scFv. In some embodiments, the iCAR comprises a CD8 alpha hinge domain (SEQ ID NO:84). In some embodiments, the iCAR comprises a CD28 hinge domain (SEQ ID NO:85). In some embodiments, the iCAR comprises a PD-1 hinge domain (SEQ ID NO:86). In some embodiments, the iCAR comprises a LIR1 Ig3-4 hinge domain (SEQ ID NO:87). In some embodiments, the iCAR comprises a LIR1 Ig-4 hinge domain (SEQ ID NO:88). In some embodiments, the iCAR comprises a LIR1 52 aa hinge domain (SEQ ID NO:89). In some embodiments, the iCAR comprises a LIR1 36 aa hinge domain (SEQ ID NO:90). In some embodiments, the iCAR comprises a LIR1 30 aa hinge domain (SEQ ID NO:91). In some embodiments, the iCAR comprises a LIR1 8 aa hinge domain (SEQ ID NO:92). In some embodiments, the iCAR comprises a CD33 hinge domain (SEQ ID NO:93). In some embodiments, the iCAR comprises a KIR2DL1 hinge domain (SEQ ID NO:94). In some embodiments, the iCAR comprises aLIR1 26 aa hinge domain (SEQ ID NO: 289). In some embodiments, the iCAR comprises PD-1 (47) hinge domain (SEQ ID NO: 290). In some embodiments, the iCAR comprises PD-1 (42) hinge domain (SEQ ID NO: 291). In some embodiments, the iCAR comprises PD-1 (36) hinge domain (SEQ ID NO: 292). In some embodiments, the iCAR comprises PD-1 (30) hinge domain (SEQ ID NO: 293). In some embodiments, the iCAR comprises PD-1 (26) hinge domain (SEQ ID NO: 294). In some embodiments, the iCAR comprises PD-1 (20) hinge domain (SEQ ID NO: 295). In some embodiments, the iCAR comprises a CD8 alpha transmembrane domain (SEQ ID NO:95). In some embodiments, the iCAR comprises a CD28 transmembrane domain (SEQ ID NO:96). In some embodiments, the iCAR comprises a PD-1 transmembrane domain (SEQ ID NO:97). In some embodiments, the iCAR comprises a LIR1 transmembrane domain (SEQ ID NO:98). In some embodiments, the iCAR comprises a CD33 transmembrane domain (SEQ ID NO:99). In some embodiments, the iCAR comprises a KIR2DL1 transmembrane domain (SEQ ID NO:100). In some embodiments, the iCAR comprises a PD-1 inhibitory domain (SEQ ID NO:101). In some embodiments, the iCAR comprises a KIR2DL1 inhibitory domain (SEQ ID NO:102). In some embodiments, the iCAR comprises a KIR2DL2 inhibitory domain (SEQ ID NO:103). In some embodiments, the iCAR comprises a KIR2DL3 inhibitory domain (SEQ ID NO:104). In some embodiments, the iCAR comprises a KIR2DL4 inhibitory domain (SEQ ID NO:105). In some embodiments, the iCAR comprises a KIR2DL5A inhibitory domain (SEQ ID NO:106). In some embodiments, the iCAR comprises a KIR3DL1 inhibitory domain (SEQ ID NO:107). In some embodiments, the iCAR comprises a KIR3DL2 inhibitory domain (SEQ ID NO:108). In some embodiments, the iCAR comprises a KIR3DL3 inhibitory domain (SEQ ID NO:109). In some embodiments, the iCAR comprises a LAIR1 inhibitory domain (SEQ ID NO:110). In some embodiments, the iCAR comprises a CD22 inhibitory domain (SEQ ID NO:111). In some embodiments, the iCAR comprises a CD33 inhibitory domain (SEQ ID NO:112). In some embodiments, the iCAR comprises a SIGLEC5 inhibitory domain (SEQ ID NO: 113). In some embodiments, the iCAR comprises a SIGLEC6 inhibitory domain (SEQ ID NO: 114). In some embodiments, the iCAR comprises a SIGLEC7 inhibitory domain (SEQ ID NO: 115). In some embodiments, the iCAR comprises a SIGLEC8 inhibitory domain (SEQ ID NO: 116). In some embodiments, the iCAR comprises a SIGLEC9 inhibitory domain (SEQ ID NO: 117). In some embodiments, the iCAR comprises a SIGLEC10 inhibitory domain (SEQ ID NO: 118). In some embodiments, the iCAR comprises a SIGLEC11 inhibitory domain (SEQ ID NO: 119). In some embodiments, the iCAR comprises a SIGLEC12 inhibitory domain (SEQ ID NO:120). In some embodiments, the iCAR comprises a PECAM1/CD31 inhibitory domain (SEQ ID NO:121). In some embodiments, the iCAR comprises a CD200R1 inhibitory domain (SEQ ID NO:122). In some embodiments, the iCAR comprises a FCRL1 inhibitory domain (SEQ ID NO:123). In some embodiments, the iCAR comprises a FCRL2 inhibitory domain (SEQ ID NO:124). In some embodiments, the iCAR comprises a FCRL3 inhibitory domain (SEQ ID NO:125). In some embodiments, the iCAR comprises a FCRL4 inhibitory domain (SEQ ID NO:126). In some embodiments, the iCAR comprises a FCRL5 inhibitory domain (SEQ ID NO:127). In some embodiments, the iCAR comprises a SLAMF1 inhibitory domain (SEQ ID NO:128). In some embodiments, the iCAR comprises a SLAMF5 inhibitory domain (SEQ ID NO:129). In some embodiments, the iCAR comprises a BTLA inhibitory domain (SEQ ID NO:130). In some embodiments, the iCAR comprises a LAG3 inhibitory domain (SEQ ID NO:131). In some embodiments, the iCAR comprises a 2B4 inhibitory domain (SEQ ID NO:132). In some embodiments, the iCAR comprises a CD160 inhibitory domain (SEQ ID NO:133). In some embodiments, the iCAR comprises a CEACAM1 inhibitory domain (SEQ ID NO:134). In some embodiments, the iCAR comprises a TIM3 inhibitory domain (SEQ ID NO:135). In some embodiments, the iCAR comprises a VISTA inhibitory domain (SEQ ID NO:136). In some embodiments, the iCAR comprises a TIGIT inhibitory domain (SEQ ID NO:137). In some embodiments, the iCAR comprises a SIRPalpha inhibitory domain (SEQ ID NO:138). In some embodiments, the iCAR comprises a FcγRIIB inhibitory domain (SEQ ID NO:139). In some embodiments, the iCAR comprises a CD5 inhibitory domain (SEQ ID NO:140). In some embodiments, the iCAR comprises a CD300a inhibitory domain (SEQ ID NO:141). In some embodiments, the iCAR comprises a CD300f inhibitory domain (SEQ ID NO:142). In some embodiments, the iCAR comprises a LIR1 inhibitory domain (SEQ ID NO:143). In some embodiments, the iCAR comprises a LIR2 inhibitory domain (SEQ ID NO:144). In some embodiments, the iCAR comprises a LIR3 inhibitory domain (SEQ ID NO:145). In some embodiments, the iCAR comprises a LIR5 inhibitory domain (SEQ ID NO:146). In some embodiments, the iCAR comprises a LIR8 inhibitory domain (SEQ ID NO:147). In some embodiments, the iCAR comprises a Ly9 inhibitory domain (SEQ ID NO:148). In some embodiments, the iCAR comprises a 2xPD1(G4S) inhibitory domain (SEQ ID NO:149). In some embodiments, the iCAR comprises a 2xPD1(PD1) inhibitory domain (SEQ ID NO:150). In some embodiments, the iCAR comprises a PVRIg inhibitory domain (SEQ ID NO:151). In some embodiments, the iCAR comprises an AA2AR inhibitory domain (SEQ ID NO:152). In some embodiments, the iCAR comprises a signal peptide upstream of the iCAR portion, wherein the signal peptide is a CD8 alpha signal peptide (SEQ ID NO: 161), a GM-CSF signal peptide (SEQ ID NO: 162), or a mIgK signal peptide (SEQ ID NO: 306).

[0338] In some embodiments, the iCAR comprises an scFv component comprising the VL and VH sequences of Hz.BB7.2 VH1-69_A18VK (SEQ ID NOs: 57 and 58). In some embodiments, the orientation of the iCAR VH and VL regions is VH-VL. In some embodiments, the orientation of the iCAR VH and VL regions is VL-VH. In some embodiments, the iCAR scFv comprises a (G4S)X3 linker (SEQ ID NO:81) linker that covalently connects the VH and the VL to form the iCAR scFv. In some embodiments, the iCAR scFv comprises a Whitlow linker (SEQ ID NO:82) linker that covalently connects the VH and the VL to form the iCAR scFv. In some embodiments, the iCAR comprises a CD8 alpha hinge domain (SEQ ID NO:84). In some embodiments, the iCAR comprises a CD28 hinge domain (SEQ ID NO:85). In some embodiments, the iCAR comprises a PD-1 hinge domain (SEQ ID NO:86). In some embodiments, the iCAR comprises a LIR1 Ig3-4 hinge domain (SEQ ID NO:87). In some embodiments, the iCAR comprises a LIR1 Ig-4 hinge domain (SEQ ID NO:88). In some embodiments, the iCAR comprises a LIR1 52 aa hinge domain (SEQ ID NO:89). In some embodiments, the iCAR comprises a LIR1 36 aa hinge domain (SEQ ID NO:90). In some embodiments, the iCAR comprises a LIR1 30 aa hinge domain (SEQ ID NO:91). In some embodiments, the iCAR comprises a LIR1 8 aa hinge domain (SEQ ID NO:92). In some embodiments, the iCAR comprises a CD33 hinge domain (SEQ ID NO:93). In some embodiments, the iCAR comprises a KIR2DL1 hinge domain (SEQ ID NO:94). In some embodiments, the iCAR comprises aLIR1 26 aa hinge domain (SEQ ID NO: 289). In some embodiments, the iCAR comprises PD-1 (47) hinge domain (SEQ ID NO: 290). In some embodiments, the iCAR comprises PD-1 (42) hinge domain (SEQ ID NO: 291). In some embodiments, the iCAR comprises PD-1 (36) hinge domain (SEQ ID NO: 292). In some embodiments, the iCAR comprises PD-1 (30) hinge domain (SEQ ID NO: 293). In some embodiments, the iCAR comprises PD-1 (26) hinge domain (SEQ ID NO: 294). In some embodiments, the iCAR comprises PD-1 (20) hinge domain (SEQ ID NO: 295). In some embodiments, the iCAR comprises a CD8 alpha transmembrane domain (SEQ ID NO:95). In some embodiments, the iCAR comprises a CD28 transmembrane domain (SEQ ID NO:96). In some embodiments, the iCAR comprises a PD-1 transmembrane domain (SEQ ID NO:97). In some embodiments, the iCAR comprises a LIR1 transmembrane domain (SEQ ID NO:98). In some embodiments, the iCAR comprises a CD33 transmembrane domain (SEQ ID NO:99). In some embodiments, the iCAR comprises a KIR2DL1 transmembrane domain (SEQ ID NO:100). In some embodiments, the iCAR comprises a PD-1 inhibitory domain (SEQ ID NO:101). In some embodiments, the iCAR comprises a KIR2DL1 inhibitory domain (SEQ ID NO:102). In some embodiments, the iCAR comprises a KIR2DL2 inhibitory domain (SEQ ID NO:103). In some embodiments, the iCAR comprises a KIR2DL3 inhibitory domain (SEQ ID NO:104). In some embodiments, the iCAR comprises a KIR2DL4 inhibitory domain (SEQ ID NO:105). In some embodiments, the iCAR comprises a KIR2DL5A inhibitory domain (SEQ ID NO:106). In some embodiments, the iCAR comprises a KIR3DL1 inhibitory domain (SEQ ID NO:107). In some embodiments, the iCAR comprises a KIR3DL2 inhibitory domain (SEQ ID NO:108). In some embodiments, the iCAR comprises a KIR3DL3 inhibitory domain (SEQ ID NO:109). In some embodiments, the iCAR comprises a LAIR1 inhibitory domain (SEQ ID NO:110). In some embodiments, the iCAR comprises a CD22 inhibitory domain (SEQ ID NO:111). In some embodiments, the iCAR comprises a CD33 inhibitory domain (SEQ ID NO:112). In some embodiments, the iCAR comprises a SIGLEC5 inhibitory domain (SEQ ID NO: 113). In some embodiments, the iCAR comprises a SIGLEC6 inhibitory domain (SEQ ID NO:114). In some embodiments, the iCAR comprises a SIGLEC7 inhibitory domain (SEQ ID NO: 115). In some embodiments, the iCAR comprises a SIGLEC8 inhibitory domain (SEQ ID NO: 116). In some embodiments, the iCAR comprises a SIGLEC9 inhibitory domain (SEQ ID NO: 117). In some embodiments, the iCAR comprises a SIGLEC10 inhibitory domain (SEQ ID NO: 118). In some embodiments, the iCAR comprises a SIGLEC11 inhibitory domain (SEQ ID NO: 119). In some embodiments, the iCAR comprises a SIGLEC12 inhibitory domain (SEQ ID NO:120). In some embodiments, the iCAR comprises a PECAM1/CD31 inhibitory domain (SEQ ID NO:121). In some embodiments, the iCAR comprises a CD200R1 inhibitory domain (SEQ ID NO:122). In some embodiments, the iCAR comprises a FCRL1 inhibitory domain (SEQ ID NO:123). In some embodiments, the iCAR comprises a FCRL2 inhibitory domain (SEQ ID NO:124). In some embodiments, the iCAR comprises a FCRL3 inhibitory domain (SEQ ID NO:125). In some embodiments, the iCAR comprises a FCRL4 inhibitory domain (SEQ ID NO:126). In some embodiments, the iCAR comprises a FCRL5 inhibitory domain (SEQ ID NO:127). In some embodiments, the iCAR comprises a SLAMF1 inhibitory domain (SEQ ID NO:128). In some embodiments, the iCAR comprises a SLAMF5 inhibitory domain (SEQ ID NO:129). In some embodiments, the iCAR comprises a BTLA inhibitory domain (SEQ ID NO:130). In some embodiments, the iCAR comprises a LAG3 inhibitory domain (SEQ ID NO:131). In some embodiments, the iCAR comprises a 2B4 inhibitory domain (SEQ ID NO:132). In some embodiments, the iCAR comprises a CD160 inhibitory domain (SEQ ID NO:133). In some embodiments, the iCAR comprises a CEACAM1 inhibitory domain (SEQ ID NO:134). In some embodiments, the iCAR comprises a TIM3 inhibitory domain (SEQ ID NO:135). In some embodiments, the iCAR comprises a VISTA inhibitory domain (SEQ ID NO:136). In some embodiments, the iCAR comprises a TIGIT inhibitory domain (SEQ ID NO:137). In some embodiments, the iCAR comprises a SIRPalpha inhibitory domain (SEQ ID NO:138). In some embodiments, the iCAR comprises a FcγRIIB inhibitory domain (SEQ ID NO:139). In some embodiments, the iCAR comprises a CD5 inhibitory domain (SEQ ID NO:140). In some embodiments, the iCAR comprises a CD300a inhibitory domain (SEQ ID NO:141). In some embodiments, the iCAR comprises a CD300f inhibitory domain (SEQ ID NO:142). In some embodiments, the iCAR comprises a LIR1 inhibitory domain (SEQ ID NO:143). In some embodiments, the iCAR comprises a LIR2 inhibitory domain (SEQ ID NO:144). In some embodiments, the iCAR comprises a LIR3 inhibitory domain (SEQ ID NO:145). In some embodiments, the iCAR comprises a LIR5 inhibitory domain (SEQ ID NO:146). In some embodiments, the iCAR comprises a LIR8 inhibitory domain (SEQ ID NO:147). In some embodiments, the iCAR comprises a Ly9 inhibitory domain (SEQ ID NO:148). In some embodiments, the iCAR comprises a 2xPD1(G4S) inhibitory domain (SEQ ID NO:149). In some embodiments, the iCAR comprises a 2xPD1(PD1) inhibitory domain (SEQ ID NO:150). In some embodiments, the iCAR comprises a PVRIg inhibitory domain (SEQ ID NO:151). In some embodiments, the iCAR comprises an AA2AR inhibitory domain (SEQ ID NO:152). In some embodiments, the iCAR comprises a signal peptide upstream of the iCAR portion, wherein the signal peptide is a CD8 alpha signal peptide (SEQ ID NO: 161), a GM-CSF signal peptide (SEQ ID NO: 162), or a mIgK signal peptide (SEQ ID NO: 306).

[0339] In some embodiments, the iCAR comprises an scFv component comprising the VL and VH sequences of Hz.BB7.2 VH1-69 (27,30)_A18 (SEQ ID NOs: 59 and 60). In some embodiments, the orientation of the iCAR VH and VL regions is VH-VL. In some embodiments, the orientation of the iCAR VH and VL regions is VL-VH. In some embodiments, the iCAR scFv comprises a (G4S)X3 linker (SEQ ID NO:81) linker that covalently connects the VH and the VL to form the iCAR scFv. In some embodiments, the iCAR scFv comprises a Whitlow linker (SEQ ID NO:82) linker that covalently connects the VH and the VL to form the iCAR scFv. In some embodiments, the iCAR comprises a CD8 alpha hinge domain (SEQ ID NO:84). In some embodiments, the iCAR comprises a CD28 hinge domain (SEQ ID NO:85). In some embodiments, the iCAR comprises a PD-1 hinge domain (SEQ ID NO:86). In some embodiments, the iCAR comprises a LIR1 Ig3-4 hinge domain (SEQ ID NO:87). In some embodiments, the iCAR comprises a LIR1 Ig-4 hinge domain (SEQ ID NO:88). In some embodiments, the iCAR comprises a LIR1 52 aa hinge domain (SEQ ID NO:89). In some embodiments, the iCAR comprises a LIR1 36 aa hinge domain (SEQ ID NO:90). In some embodiments, the iCAR comprises a LIR1 30 aa hinge domain (SEQ ID NO:91). In some embodiments, the iCAR comprises a LIR1 8 aa hinge domain (SEQ ID NO:92). In some embodiments, the iCAR comprises a CD33 hinge domain (SEQ ID NO:93). In some embodiments, the iCAR comprises a KIR2DL1 hinge domain (SEQ ID NO:94). In some embodiments, the iCAR comprises aLIR1 26 aa hinge domain (SEQ ID NO: 289). In some embodiments, the iCAR comprises PD-1 (47) hinge domain (SEQ ID NO: 290). In some embodiments, the iCAR comprises PD-1 (42) hinge domain (SEQ ID NO: 291). In some embodiments, the iCAR comprises PD-1 (36) hinge domain (SEQ ID NO: 292). In some embodiments, the iCAR comprises PD-1 (30) hinge domain (SEQ ID NO: 293). In some embodiments, the iCAR comprises PD-1 (26) hinge domain (SEQ ID NO: 294). In some embodiments, the iCAR comprises PD-1 (20) hinge domain (SEQ ID NO: 295). In some embodiments, the iCAR comprises a CD8 alpha transmembrane domain (SEQ ID NO:95). In some embodiments, the iCAR comprises a CD28 transmembrane domain (SEQ ID NO:96). In some embodiments, the iCAR comprises a PD-1 transmembrane domain (SEQ ID NO:97). In some embodiments, the iCAR comprises a LIR1 transmembrane domain (SEQ ID NO:98). In some embodiments, the iCAR comprises a CD33 transmembrane domain (SEQ ID NO:99). In some embodiments, the iCAR comprises a KIR2DL1 transmembrane domain (SEQ ID NO:100). In some embodiments, the iCAR comprises a PD-1 inhibitory domain (SEQ ID NO:101). In some embodiments, the iCAR comprises a KIR2DL1 inhibitory domain (SEQ ID NO:102). In some embodiments, the iCAR comprises a KIR2DL2 inhibitory domain (SEQ ID NO:103). In some embodiments, the iCAR comprises a KIR2DL3 inhibitory domain (SEQ ID NO:104). In some embodiments, the iCAR comprises a KIR2DL4 inhibitory domain (SEQ ID NO:105). In some embodiments, the iCAR comprises a KIR2DL5A inhibitory domain (SEQ ID NO:106). In some embodiments, the iCAR comprises a KIR3DL1 inhibitory domain (SEQ ID NO:107). In some embodiments, the iCAR comprises a KIR3DL2 inhibitory domain (SEQ ID NO:108). In some embodiments, the iCAR comprises a KIR3DL3 inhibitory domain (SEQ ID NO:109). In some embodiments, the iCAR comprises a LAIR1 inhibitory domain (SEQ ID NO:110). In some embodiments, the iCAR comprises a CD22 inhibitory domain (SEQ ID NO:111). In some embodiments, the iCAR comprises a CD33 inhibitory domain (SEQ ID NO:112). In some embodiments, the iCAR comprises a SIGLEC5 inhibitory domain (SEQ ID NO: 113). In some embodiments, the iCAR comprises a SIGLEC6 inhibitory domain (SEQ ID NO:114). In some embodiments, the iCAR comprises a SIGLEC7 inhibitory domain (SEQ ID NO: 115). In some embodiments, the iCAR comprises a SIGLEC8 inhibitory domain (SEQ ID NO: 116). In some embodiments, the iCAR comprises a SIGLEC9 inhibitory domain (SEQ ID NO: 117). In some embodiments, the iCAR comprises a SIGLEC10 inhibitory domain (SEQ ID NO: 118). In some embodiments, the iCAR comprises a SIGLEC11 inhibitory domain (SEQ ID NO: 119). In some embodiments, the iCAR comprises a SIGLEC12 inhibitory domain (SEQ ID NO:120). In some embodiments, the iCAR comprises a PECAM1/CD31 inhibitory domain (SEQ ID NO:121). In some embodiments, the iCAR comprises a CD200R1 inhibitory domain (SEQ ID NO:122). In some embodiments, the iCAR comprises a FCRL1 inhibitory domain (SEQ ID NO:123). In some embodiments, the iCAR comprises a FCRL2 inhibitory domain (SEQ ID NO:124). In some embodiments, the iCAR comprises a FCRL3 inhibitory domain (SEQ ID NO:125). In some embodiments, the iCAR comprises a FCRL4 inhibitory domain (SEQ ID NO:126). In some embodiments, the iCAR comprises a FCRL5 inhibitory domain (SEQ ID NO:127). In some embodiments, the iCAR comprises a SLAMF1 inhibitory domain (SEQ ID NO:128). In some embodiments, the iCAR comprises a SLAMF5 inhibitory domain (SEQ ID NO:129). In some embodiments, the iCAR comprises a BTLA inhibitory domain (SEQ ID NO:130). In some embodiments, the iCAR comprises a LAG3 inhibitory domain (SEQ ID NO:131). In some embodiments, the iCAR comprises a 2B4 inhibitory domain (SEQ ID NO:132). In some embodiments, the iCAR comprises a CD160 inhibitory domain (SEQ ID NO:133). In some embodiments, the iCAR comprises a CEACAM1 inhibitory domain (SEQ ID NO:134). In some embodiments, the iCAR comprises a TIM3 inhibitory domain (SEQ ID NO:135). In some embodiments, the iCAR comprises a VISTA inhibitory domain (SEQ ID NO:136). In some embodiments, the iCAR comprises a TIGIT inhibitory domain (SEQ ID NO:137). In some embodiments, the iCAR comprises a SIRPalpha inhibitory domain (SEQ ID NO:138). In some embodiments, the iCAR comprises a FcγRIIB inhibitory domain (SEQ ID NO:139). In some embodiments, the iCAR comprises a CD5 inhibitory domain (SEQ ID NO:140). In some embodiments, the iCAR comprises a CD300a inhibitory domain (SEQ ID NO:141). In some embodiments, the iCAR comprises a CD300f inhibitory domain (SEQ ID NO:142). In some embodiments, the iCAR comprises a LIR1 inhibitory domain (SEQ ID NO:143). In some embodiments, the iCAR comprises a LIR2 inhibitory domain (SEQ ID NO:144). In some embodiments, the iCAR comprises a LIR3 inhibitory domain (SEQ ID NO:145). In some embodiments, the iCAR comprises a LIR5 inhibitory domain (SEQ ID NO:146). In some embodiments, the iCAR comprises a LIR8 inhibitory domain (SEQ ID NO:147). In some embodiments, the iCAR comprises a Ly9 inhibitory domain (SEQ ID NO:148). In some embodiments, the iCAR comprises a 2xPD1(G4S) inhibitory domain (SEQ ID NO:149). In some embodiments, the iCAR comprises a 2xPD1(PD1) inhibitory domain (SEQ ID NO:150). In some embodiments, the iCAR comprises a PVRIg inhibitory domain (SEQ ID NO:151). In some embodiments, the iCAR comprises an AA2AR inhibitory domain (SEQ ID NO:152). In some embodiments, the iCAR comprises a signal peptide upstream of the iCAR portion, wherein the signal peptide is a CD8 alpha signal peptide (SEQ ID NO: 161), a GM-CSF signal peptide (SEQ ID NO: 162), or a mIgK signal peptide (SEQ ID NO: 306).

[0340] In some embodiments, the iCAR comprises an scFv component comprising the VL and VH sequences of Hz.BB7.2VH1-69 (27,30,48)_A18 (SEQ ID NOs: 61 and 62). In some embodiments, the orientation of the iCAR VH and VL regions is VH-VL. In some embodiments, the orientation of the iCAR VH and VL regions is VL-VH. In some embodiments, the iCAR scFv comprises a (G4S)X3 linker (SEQ ID NO:81) linker that covalently connects the VH and the VL to form the iCAR scFv. In some embodiments, the iCAR scFv comprises a Whitlow linker (SEQ ID NO:82) linker that covalently connects the VH and the VL to form the iCAR scFv. In some embodiments, the iCAR comprises a CD8 alpha hinge domain (SEQ ID NO:84). In some embodiments, the iCAR comprises a CD28 hinge domain (SEQ ID NO:85). In some embodiments, the iCAR comprises a PD-1 hinge domain (SEQ ID NO:86). In some embodiments, the iCAR comprises a LIR1 Ig3-4 hinge domain (SEQ ID NO:87). In some embodiments, the iCAR comprises a LIR1 Ig-4 hinge domain (SEQ ID NO:88). In some embodiments, the iCAR comprises a LIR1 52 aa hinge domain (SEQ ID NO:89). In some embodiments, the iCAR comprises a LIR1 36 aa hinge domain (SEQ ID NO:90). In some embodiments, the iCAR comprises a LIR1 30 aa hinge domain (SEQ ID NO:91). In some embodiments, the iCAR comprises a LIR1 8 aa hinge domain (SEQ ID NO:92). In some embodiments, the iCAR comprises a CD33 hinge domain (SEQ ID NO:93). In some embodiments, the iCAR comprises a KIR2DL1 hinge domain (SEQ ID NO:94). In some embodiments, the iCAR comprises aLIR1 26 aa hinge domain (SEQ ID NO: 289). In some embodiments, the iCAR comprises PD-1 (47) hinge domain (SEQ ID NO: 290). In some embodiments, the iCAR comprises PD-1 (42) hinge domain (SEQ ID NO: 291). In some embodiments, the iCAR comprises PD-1 (36) hinge domain (SEQ ID NO: 292). In some embodiments, the iCAR comprises PD-1 (30) hinge domain (SEQ ID NO: 293). In some embodiments, the iCAR comprises PD-1 (26) hinge domain (SEQ ID NO: 294). In some embodiments, the iCAR comprises PD-1 (20) hinge domain (SEQ ID NO: 295). In some embodiments, the iCAR comprises a CD8 alpha transmembrane domain (SEQ ID NO:95). In some embodiments, the iCAR comprises a CD28 transmembrane domain (SEQ ID NO:96). In some embodiments, the iCAR comprises a PD-1 transmembrane domain (SEQ ID NO:97). In some embodiments, the iCAR comprises a LIR1 transmembrane domain (SEQ ID NO:98). In some embodiments, the iCAR comprises a CD33 transmembrane domain (SEQ ID NO:99). In some embodiments, the iCAR comprises a KIR2DL1 transmembrane domain (SEQ ID NO:100). In some embodiments, the iCAR comprises a PD-1 inhibitory domain (SEQ ID NO:101). In some embodiments, the iCAR comprises a KIR2DL1 inhibitory domain (SEQ ID NO:102). In some embodiments, the iCAR comprises a KIR2DL2 inhibitory domain (SEQ ID NO:103). In some embodiments, the iCAR comprises a KIR2DL3 inhibitory domain (SEQ ID NO:104). In some embodiments, the iCAR comprises a KIR2DL4 inhibitory domain (SEQ ID NO:105). In some embodiments, the iCAR comprises a KIR2DL5A inhibitory domain (SEQ ID NO:106). In some embodiments, the iCAR comprises a KIR3DL1 inhibitory domain (SEQ ID NO:107). In some embodiments, the iCAR comprises a KIR3DL2 inhibitory domain (SEQ ID NO:108). In some embodiments, the iCAR comprises a KIR3DL3 inhibitory domain (SEQ ID NO:109). In some embodiments, the iCAR comprises a LAIR1 inhibitory domain (SEQ ID NO:110). In some embodiments, the iCAR comprises a CD22 inhibitory domain (SEQ ID NO:111). In some embodiments, the iCAR comprises a CD33 inhibitory domain (SEQ ID NO:112). In some embodiments, the iCAR comprises a SIGLEC5 inhibitory domain (SEQ ID NO: 113). In some embodiments, the iCAR comprises a SIGLEC6 inhibitory domain (SEQ ID NO:114). In some embodiments, the iCAR comprises a SIGLEC7 inhibitory domain (SEQ ID NO: 115). In some embodiments, the iCAR comprises a SIGLEC8 inhibitory domain (SEQ ID NO: 116). In some embodiments, the iCAR comprises a SIGLEC9 inhibitory domain (SEQ ID NO:117). In some embodiments, the iCAR comprises a SIGLEC10 inhibitory domain (SEQ ID NO: 118). In some embodiments, the iCAR comprises a SIGLEC11 inhibitory domain (SEQ ID NO: 119). In some embodiments, the iCAR comprises a SIGLEC12 inhibitory domain (SEQ ID NO:120). In some embodiments, the iCAR comprises a PECAM1/CD31 inhibitory domain (SEQ ID NO:121). In some embodiments, the iCAR comprises a CD200R1 inhibitory domain (SEQ ID NO:122). In some embodiments, the iCAR comprises a FCRL1 inhibitory domain (SEQ ID NO:123). In some embodiments, the iCAR comprises a FCRL2 inhibitory domain (SEQ ID NO:124). In some embodiments, the iCAR comprises a FCRL3 inhibitory domain (SEQ ID NO:125). In some embodiments, the iCAR comprises a FCRL4 inhibitory domain (SEQ ID NO:126). In some embodiments, the iCAR comprises a FCRL5 inhibitory domain (SEQ ID NO:127). In some embodiments, the iCAR comprises a SLAMF1 inhibitory domain (SEQ ID NO:128). In some embodiments, the iCAR comprises a SLAMF5 inhibitory domain (SEQ ID NO:129). In some embodiments, the iCAR comprises a BTLA inhibitory domain (SEQ ID NO:130). In some embodiments, the iCAR comprises a LAG3 inhibitory domain (SEQ ID NO:131). In some embodiments, the iCAR comprises a 2B4 inhibitory domain (SEQ ID NO:132). In some embodiments, the iCAR comprises a CD160 inhibitory domain (SEQ ID NO:133). In some embodiments, the iCAR comprises a CEACAM1 inhibitory domain (SEQ ID NO:134). In some embodiments, the iCAR comprises a TIM3 inhibitory domain (SEQ ID NO:135). In some embodiments, the iCAR comprises a VISTA inhibitory domain (SEQ ID NO:136). In some embodiments, the iCAR comprises a TIGIT inhibitory domain (SEQ ID NO:137). In some embodiments, the iCAR comprises a SIRPalpha inhibitory domain (SEQ ID NO:138). In some embodiments, the iCAR comprises a FcγRIIB inhibitory domain (SEQ ID NO:139). In some embodiments, the iCAR comprises a CD5 inhibitory domain (SEQ ID NO:140). In some embodiments, the iCAR comprises a CD300a inhibitory domain (SEQ ID NO:141). In some embodiments, the iCAR comprises a CD300f inhibitory domain (SEQ ID NO:142). In some embodiments, the iCAR comprises a LIR1 inhibitory domain (SEQ ID NO:143). In some embodiments, the iCAR comprises a LIR2 inhibitory domain (SEQ ID NO:144). In some embodiments, the iCAR comprises a LIR3 inhibitory domain (SEQ ID NO:145). In some embodiments, the iCAR comprises a LIR5 inhibitory domain (SEQ ID NO:146). In some embodiments, the iCAR comprises a LIR8 inhibitory domain (SEQ ID NO:147). In some embodiments, the iCAR comprises a Ly9 inhibitory domain (SEQ ID NO:148). In some embodiments, the iCAR comprises a 2xPD1(G4S) inhibitory domain (SEQ ID NO:149). In some embodiments, the iCAR comprises a 2xPD1(PD1) inhibitory domain (SEQ ID NO:150). In some embodiments, the iCAR comprises a PVRIg inhibitory domain (SEQ ID NO:151). In some embodiments, the iCAR comprises an AA2AR inhibitory domain (SEQ ID NO:152). In some embodiments, the iCAR comprises a signal peptide upstream of the iCAR portion, wherein the signal peptide is a CD8 alpha signal peptide (SEQ ID NO: 161), a GM-CSF signal peptide (SEQ ID NO: 162), or a mIgK signal peptide (SEQ ID NO: 306).

[0341] In some embodiments, the iCAR comprises an scFv component comprising the VL and VH sequences of Hz.BB7.2 VH1-69 (27,30,67)_A18 (SEQ ID NOs: 63 and 64). In some embodiments, the orientation of the iCAR VH and VL regions is VH-VL. In some embodiments, the orientation of the iCAR VH and VL regions is VL-VH. In some embodiments, the iCAR scFv comprises a (G4S)X3 linker (SEQ ID NO:81) linker that covalently connects the VH and the VL to form the iCAR scFv. In some embodiments, the iCAR scFv comprises a Whitlow linker (SEQ ID NO:82) linker that covalently connects the VH and the VL to form the iCAR scFv. In some embodiments, the iCAR comprises a CD8 alpha hinge domain (SEQ ID NO:84). In some embodiments, the iCAR comprises a CD28 hinge domain (SEQ ID NO:85). In some embodiments, the iCAR comprises a PD-1 hinge domain (SEQ ID NO:86). In some embodiments, the iCAR comprises a LIR1 Ig3-4 hinge domain (SEQ ID NO:87). In some embodiments, the iCAR comprises a LIR1 Ig-4 hinge domain (SEQ ID NO:88). In some embodiments, the iCAR comprises a LIR1 52 aa hinge domain (SEQ ID NO:89). In some embodiments, the iCAR comprises a LIR1 36 aa hinge domain (SEQ ID NO:90). In some embodiments, the iCAR comprises a LIR1 30 aa hinge domain (SEQ ID NO:91). In some embodiments, the iCAR comprises a LIR1 8 aa hinge domain (SEQ ID NO:92). In some embodiments, the iCAR comprises a CD33 hinge domain (SEQ ID NO:93). In some embodiments, the iCAR comprises a KIR2DL1 hinge domain (SEQ ID NO:94). In some embodiments, the iCAR comprises aLIR1 26 aa hinge domain (SEQ ID NO: 289). In some embodiments, the iCAR comprises PD-1 (47) hinge domain (SEQ ID NO: 290). In some embodiments, the iCAR comprises PD-1 (42) hinge domain (SEQ ID NO: 291). In some embodiments, the iCAR comprises PD-1 (36) hinge domain (SEQ ID NO: 292). In some embodiments, the iCAR comprises PD-1 (30) hinge domain (SEQ ID NO: 293). In some embodiments, the iCAR comprises PD-1 (26) hinge domain (SEQ ID NO: 294). In some embodiments, the iCAR comprises PD-1 (20) hinge domain (SEQ ID NO: 295). In some embodiments, the iCAR comprises a CD8 alpha transmembrane domain (SEQ ID NO:95). In some embodiments, the iCAR comprises a CD28 transmembrane domain (SEQ ID NO:96). In some embodiments, the iCAR comprises a PD-1 transmembrane domain (SEQ ID NO:97). In some embodiments, the iCAR comprises a LIR1 transmembrane domain (SEQ ID NO:98). In some embodiments, the iCAR comprises a CD33 transmembrane domain (SEQ ID NO:99). In some embodiments, the iCAR comprises a KIR2DL1 transmembrane domain (SEQ ID NO:100). In some embodiments, the iCAR comprises a PD-1 inhibitory domain (SEQ ID NO:101). In some embodiments, the iCAR comprises a KIR2DL1 inhibitory domain (SEQ ID NO:102). In some embodiments, the iCAR comprises a KIR2DL2 inhibitory domain (SEQ ID NO:103). In some embodiments, the iCAR comprises a KIR2DL3 inhibitory domain (SEQ ID NO:104). In some embodiments, the iCAR comprises a KIR2DL4 inhibitory domain (SEQ ID NO:105). In some embodiments, the iCAR comprises a KIR2DL5A inhibitory domain (SEQ ID NO:106). In some embodiments, the iCAR comprises a KIR3DL1 inhibitory domain (SEQ ID NO:107). In some embodiments, the iCAR comprises a KIR3DL2 inhibitory domain (SEQ ID NO:108). In some embodiments, the iCAR comprises a KIR3DL3 inhibitory domain (SEQ ID NO:109). In some embodiments, the iCAR comprises a LAIR1 inhibitory domain (SEQ ID NO:110). In some embodiments, the iCAR comprises a CD22 inhibitory domain (SEQ ID NO:111). In some embodiments, the iCAR comprises a CD33 inhibitory domain (SEQ ID NO:112). In some embodiments, the iCAR comprises a SIGLEC5 inhibitory domain (SEQ ID NO: 113). In some embodiments, the iCAR comprises a SIGLEC6 inhibitory domain (SEQ ID NO:114). In some embodiments, the iCAR comprises a SIGLEC7 inhibitory domain (SEQ ID NO: 115). In some embodiments, the iCAR comprises a SIGLEC8 inhibitory domain (SEQ ID NO: 116). In some embodiments, the iCAR comprises a SIGLEC9 inhibitory domain (SEQ ID NO: 117). In some embodiments, the iCAR comprises a SIGLEC10 inhibitory domain (SEQ ID NO: 118). In some embodiments, the iCAR comprises a SIGLEC11 inhibitory domain (SEQ ID NO: 119). In some embodiments, the iCAR comprises a SIGLEC12 inhibitory domain (SEQ ID NO:120). In some embodiments, the iCAR comprises a PECAM1/CD31 inhibitory domain (SEQ ID NO:121). In some embodiments, the iCAR comprises a CD200R1 inhibitory domain (SEQ ID NO:122). In some embodiments, the iCAR comprises a FCRL1 inhibitory domain (SEQ ID NO:123). In some embodiments, the iCAR comprises a FCRL2 inhibitory domain (SEQ ID NO:124). In some embodiments, the iCAR comprises a FCRL3 inhibitory domain (SEQ ID NO:125). In some embodiments, the iCAR comprises a FCRL4 inhibitory domain (SEQ ID NO:126). In some embodiments, the iCAR comprises a FCRL5 inhibitory domain (SEQ ID NO:127). In some embodiments, the iCAR comprises a SLAMF1 inhibitory domain (SEQ ID NO:128). In some embodiments, the iCAR comprises a SLAMF5 inhibitory domain (SEQ ID NO:129). In some embodiments, the iCAR comprises a BTLA inhibitory domain (SEQ ID NO:130). In some embodiments, the iCAR comprises a LAG3 inhibitory domain (SEQ ID NO:131). In some embodiments, the iCAR comprises a 2B4 inhibitory domain (SEQ ID NO:132). In some embodiments, the iCAR comprises a CD160 inhibitory domain (SEQ ID NO:133). In some embodiments, the iCAR comprises a CEACAM1 inhibitory domain (SEQ ID NO:134). In some embodiments, the iCAR comprises a TIM3 inhibitory domain (SEQ ID NO:135). In some embodiments, the iCAR comprises a VISTA inhibitory domain (SEQ ID NO:136). In some embodiments, the iCAR comprises a TIGIT inhibitory domain (SEQ ID NO:137). In some embodiments, the iCAR comprises a SIRPalpha inhibitory domain (SEQ ID NO:138). In some embodiments, the iCAR comprises a FcγRIIB inhibitory domain (SEQ ID NO:139). In some embodiments, the iCAR comprises a CD5 inhibitory domain (SEQ ID NO:140). In some embodiments, the iCAR comprises a CD300a inhibitory domain (SEQ ID NO:141). In some embodiments, the iCAR comprises a CD300f inhibitory domain (SEQ ID NO:142). In some embodiments, the iCAR comprises a LIR1 inhibitory domain (SEQ ID NO:143). In some embodiments, the iCAR comprises a LIR2 inhibitory domain (SEQ ID NO:144). In some embodiments, the iCAR comprises a LIR3 inhibitory domain (SEQ ID NO:145). In some embodiments, the iCAR comprises a LIR5 inhibitory domain (SEQ ID NO:146). In some embodiments, the iCAR comprises a LIR8 inhibitory domain (SEQ ID NO:147). In some embodiments, the iCAR comprises a Ly9 inhibitory domain (SEQ ID NO:148). In some embodiments, the iCAR comprises a 2xPD1(G4S) inhibitory domain (SEQ ID NO:149). In some embodiments, the iCAR comprises a 2xPD1(PD1) inhibitory domain (SEQ ID NO:150). In some embodiments, the iCAR comprises a PVRIg inhibitory domain (SEQ ID NO:151). In some embodiments, the iCAR comprises an AA2AR inhibitory domain (SEQ ID NO:152). In some embodiments, the iCAR comprises a signal peptide upstream of the iCAR portion, wherein the signal peptide is a CD8 alpha signal peptide (SEQ ID NO: 161), a GM-CSF signal peptide (SEQ ID NO: 162), or a mIgK signal peptide (SEQ ID NO: 306).

[0342] In some embodiments, the iCAR comprises an scFv component comprising the VL and VH sequences of Hz.BB7.2 VH1-69 (27,30,69)_A18 (SEQ ID NOs: 65 and 66). In some embodiments, the orientation of the iCAR VH and VL regions is VH-VL. In some embodiments, the orientation of the iCAR VH and VL regions is VL-VH. In some embodiments, the iCAR scFv comprises a (G4S)X3 linker (SEQ ID NO:81) linker that covalently connects the VH and the VL to form the iCAR scFv. In some embodiments, the iCAR scFv comprises a Whitlow linker (SEQ ID NO:82) linker that covalently connects the VH and the VL to form the iCAR scFv. In some embodiments, the iCAR comprises a CD8 alpha hinge domain (SEQ ID NO:84). In some embodiments, the iCAR comprises a CD28 hinge domain (SEQ ID NO:85). In some embodiments, the iCAR comprises a PD-1 hinge domain (SEQ ID NO:86). In some embodiments, the iCAR comprises a LIR1 Ig3-4 hinge domain (SEQ ID NO:87). In some embodiments, the iCAR comprises a LIR1 Ig-4 hinge domain (SEQ ID NO:88). In some embodiments, the iCAR comprises a LIR1 52 aa hinge domain (SEQ ID NO:89). In some embodiments, the iCAR comprises a LIR1 36 aa hinge domain (SEQ ID NO:90). In some embodiments, the iCAR comprises a LIR1 30 aa hinge domain (SEQ ID NO:91). In some embodiments, the iCAR comprises a LIR1 8 aa hinge domain (SEQ ID NO:92). In some embodiments, the iCAR comprises a CD33 hinge domain (SEQ ID NO:93). In some embodiments, the iCAR comprises a KIR2DL1 hinge domain (SEQ ID NO:94). In some embodiments, the iCAR comprises aLIR1 26 aa hinge domain (SEQ ID NO: 289). In some embodiments, the iCAR comprises PD-1 (47) hinge domain (SEQ ID NO: 290). In some embodiments, the iCAR comprises PD-1 (42) hinge domain (SEQ ID NO: 291). In some embodiments, the iCAR comprises PD-1 (36) hinge domain (SEQ ID NO: 292). In some embodiments, the iCAR comprises PD-1 (30) hinge domain (SEQ ID NO: 293). In some embodiments, the iCAR comprises PD-1 (26) hinge domain (SEQ ID NO: 294). In some embodiments, the iCAR comprises PD-1 (20) hinge domain (SEQ ID NO: 295). In some embodiments, the iCAR comprises a CD8 alpha transmembrane domain (SEQ ID NO:95). In some embodiments, the iCAR comprises a CD28 transmembrane domain (SEQ ID NO:96). In some embodiments, the iCAR comprises a PD-1 transmembrane domain (SEQ ID NO:97). In some embodiments, the iCAR comprises a LIR1 transmembrane domain (SEQ ID NO:98). In some embodiments, the iCAR comprises a CD33 transmembrane domain (SEQ ID NO:99). In some embodiments, the iCAR comprises a KIR2DL1 transmembrane domain (SEQ ID NO:100). In some embodiments, the iCAR comprises a PD-1 inhibitory domain (SEQ ID NO:101). In some embodiments, the iCAR comprises a KIR2DL1 inhibitory domain (SEQ ID NO:102). In some embodiments, the iCAR comprises a KIR2DL2 inhibitory domain (SEQ ID NO:103). In some embodiments, the iCAR comprises a KIR2DL3 inhibitory domain (SEQ ID NO:104). In some embodiments, the iCAR comprises a KIR2DL4 inhibitory domain (SEQ ID NO:105). In some embodiments, the iCAR comprises a KIR2DL5A inhibitory domain (SEQ ID NO:106). In some embodiments, the iCAR comprises a KIR3DL1 inhibitory domain (SEQ ID NO:107). In some embodiments, the iCAR comprises a KIR3DL2 inhibitory domain (SEQ ID NO:108). In some embodiments, the iCAR comprises a KIR3DL3 inhibitory domain (SEQ ID NO:109). In some embodiments, the iCAR comprises a LAIR1 inhibitory domain (SEQ ID NO:110). In some embodiments, the iCAR comprises a CD22 inhibitory domain (SEQ ID NO:111). In some embodiments, the iCAR comprises a CD33 inhibitory domain (SEQ ID NO:112). In some embodiments, the iCAR comprises a SIGLEC5 inhibitory domain (SEQ ID NO: 113). In some embodiments, the iCAR comprises a SIGLEC6 inhibitory domain (SEQ ID NO:114). In some embodiments, the iCAR comprises a SIGLEC7 inhibitory domain (SEQ ID NO: 115). In some embodiments, the iCAR comprises a SIGLEC8 inhibitory domain (SEQ ID NO: 116). In some embodiments, the iCAR comprises a SIGLEC9 inhibitory domain (SEQ ID NO: 117). In some embodiments, the iCAR comprises a SIGLEC10 inhibitory domain (SEQ ID NO: 118). In some embodiments, the iCAR comprises a SIGLEC11 inhibitory domain (SEQ ID NO: 119). In some embodiments, the iCAR comprises a SIGLEC12 inhibitory domain (SEQ ID NO:120). In some embodiments, the iCAR comprises a PECAM1/CD31 inhibitory domain (SEQ ID NO:121). In some embodiments, the iCAR comprises a CD200R1 inhibitory domain (SEQ ID NO:122). In some embodiments, the iCAR comprises a FCRL1 inhibitory domain (SEQ ID NO:123). In some embodiments, the iCAR comprises a FCRL2 inhibitory domain (SEQ ID NO:124). In some embodiments, the iCAR comprises a FCRL3 inhibitory domain (SEQ ID NO:125). In some embodiments, the iCAR comprises a FCRL4 inhibitory domain (SEQ ID NO:126). In some embodiments, the iCAR comprises a FCRL5 inhibitory domain (SEQ ID NO:127). In some embodiments, the iCAR comprises a SLAMF1 inhibitory domain (SEQ ID NO:128). In some embodiments, the iCAR comprises a SLAMF5 inhibitory domain (SEQ ID NO:129). In some embodiments, the iCAR comprises a BTLA inhibitory domain (SEQ ID NO:130). In some embodiments, the iCAR comprises a LAG3 inhibitory domain (SEQ ID NO:131). In some embodiments, the iCAR comprises a 2B4 inhibitory domain (SEQ ID NO:132). In some embodiments, the iCAR comprises a CD160 inhibitory domain (SEQ ID NO:133). In some embodiments, the iCAR comprises a CEACAM1 inhibitory domain (SEQ ID NO:134). In some embodiments, the iCAR comprises a TIM3 inhibitory domain (SEQ ID NO:135). In some embodiments, the iCAR comprises a VISTA inhibitory domain (SEQ ID NO:136). In some embodiments, the iCAR comprises a TIGIT inhibitory domain (SEQ ID NO:137). In some embodiments, the iCAR comprises a SIRPalpha inhibitory domain (SEQ ID NO:138). In some embodiments, the iCAR comprises a FcγRIIB inhibitory domain (SEQ ID NO:139). In some embodiments, the iCAR comprises a CD5 inhibitory domain (SEQ ID NO:140). In some embodiments, the iCAR comprises a CD300a inhibitory domain (SEQ ID NO:141). In some embodiments, the iCAR comprises a CD300f inhibitory domain (SEQ ID NO:142). In some embodiments, the iCAR comprises a LIR1 inhibitory domain (SEQ ID NO:143). In some embodiments, the iCAR comprises a LIR2 inhibitory domain (SEQ ID NO:144). In some embodiments, the iCAR comprises a LIR3 inhibitory domain (SEQ ID NO:145). In some embodiments, the iCAR comprises a LIR5 inhibitory domain (SEQ ID NO:146). In some embodiments, the iCAR comprises a LIR8 inhibitory domain (SEQ ID NO:147). In some embodiments, the iCAR comprises a Ly9 inhibitory domain (SEQ ID NO:148). In some embodiments, the iCAR comprises a 2xPD1(G4S) inhibitory domain (SEQ ID NO:149). In some embodiments, the iCAR comprises a 2xPD1(PD1) inhibitory domain (SEQ ID NO:150). In some embodiments, the iCAR comprises a PVRIg inhibitory domain (SEQ ID NO:151). In some embodiments, the iCAR comprises an AA2AR inhibitory domain (SEQ ID NO:152). In some embodiments, the iCAR comprises a signal peptide upstream of the iCAR portion, wherein the signal peptide is a CD8 alpha signal peptide (SEQ ID NO: 161), a GM-CSF signal peptide (SEQ ID NO: 162), or a mIgK signal peptide (SEQ ID NO: 306).

[0343] In some embodiments, the iCAR comprises an scFv component comprising the VL and VH sequences of Hz.BB7.2 VH1-69 (27,30,67,69)_A18 (SEQ ID NOs: 67 and 68). In some embodiments, the orientation of the iCAR VH and VL regions is VH-VL. In some embodiments, the orientation of the iCAR VH and VL regions is VL-VH. In some embodiments, the iCAR scFv comprises a (G4S)X3 linker (SEQ ID NO:81) linker that covalently connects the VH and the VL to form the iCAR scFv. In some embodiments, the iCAR scFv comprises a Whitlow linker (SEQ ID NO:82) linker that covalently connects the VH and the VL to form the iCAR scFv. In some embodiments, the iCAR comprises a CD8 alpha hinge domain (SEQ ID NO:84). In some embodiments, the iCAR comprises a CD28 hinge domain (SEQ ID NO:85). In some embodiments, the iCAR comprises a PD-1 hinge domain (SEQ ID NO:86). In some embodiments, the iCAR comprises a LIR1 Ig3-4 hinge domain (SEQ ID NO:87). In some embodiments, the iCAR comprises a LIR1 Ig-4 hinge domain (SEQ ID NO:88). In some embodiments, the iCAR comprises a LIR1 52 aa hinge domain (SEQ ID NO:89). In some embodiments, the iCAR comprises a LIR1 36 aa hinge domain (SEQ ID NO:90). In some embodiments, the iCAR comprises a LIR1 30 aa hinge domain (SEQ ID NO:91). In some embodiments, the iCAR comprises a LIR1 8 aa hinge domain (SEQ ID NO:92). In some embodiments, the iCAR comprises a CD33 hinge domain (SEQ ID NO:93). In some embodiments, the iCAR comprises a KIR2DL1 hinge domain (SEQ ID NO:94). In some embodiments, the iCAR comprises aLIR1 26 aa hinge domain (SEQ ID NO: 289). In some embodiments, the iCAR comprises PD-1 (47) hinge domain (SEQ ID NO: 290). In some embodiments, the iCAR comprises PD-1 (42) hinge domain (SEQ ID NO: 291). In some embodiments, the iCAR comprises PD-1 (36) hinge domain (SEQ ID NO: 292). In some embodiments, the iCAR comprises PD-1 (30) hinge domain (SEQ ID NO: 293). In some embodiments, the iCAR comprises PD-1 (26) hinge domain (SEQ ID NO: 294). In some embodiments, the iCAR comprises PD-1 (20) hinge domain (SEQ ID NO: 295). In some embodiments, the iCAR comprises a CD8 alpha transmembrane domain (SEQ ID NO:95). In some embodiments, the iCAR comprises a CD28 transmembrane domain (SEQ ID NO:96). In some embodiments, the iCAR comprises a PD-1 transmembrane domain (SEQ ID NO:97). In some embodiments, the iCAR comprises a LIR1 transmembrane domain (SEQ ID NO:98). In some embodiments, the iCAR comprises a CD33 transmembrane domain (SEQ ID NO:99). In some embodiments, the iCAR comprises a KIR2DL1 transmembrane domain (SEQ ID NO:100). In some embodiments, the iCAR comprises a PD-1 inhibitory domain (SEQ ID NO:101). In some embodiments, the iCAR comprises a KIR2DL1 inhibitory domain (SEQ ID NO:102). In some embodiments, the iCAR comprises a KIR2DL2 inhibitory domain (SEQ ID NO:103). In some embodiments, the iCAR comprises a KIR2DL3 inhibitory domain (SEQ ID NO:104). In some embodiments, the iCAR comprises a KIR2DL4 inhibitory domain (SEQ ID NO:105). In some embodiments, the iCAR comprises a KIR2DL5A inhibitory domain (SEQ ID NO:106). In some embodiments, the iCAR comprises a KIR3DL1 inhibitory domain (SEQ ID NO:107). In some embodiments, the iCAR comprises a KIR3DL2 inhibitory domain (SEQ ID NO:108). In some embodiments, the iCAR comprises a KIR3DL3 inhibitory domain (SEQ ID NO:109). In some embodiments, the iCAR comprises a LAIR1 inhibitory domain (SEQ ID NO:110). In some embodiments, the iCAR comprises a CD22 inhibitory domain (SEQ ID NO:111). In some embodiments, the iCAR comprises a CD33 inhibitory domain (SEQ ID NO:112). In some embodiments, the iCAR comprises a SIGLEC5 inhibitory domain (SEQ ID NO: 113). In some embodiments, the iCAR comprises a SIGLEC6 inhibitory domain (SEQ ID NO:114). In some embodiments, the iCAR comprises a SIGLEC7 inhibitory domain (SEQ ID NO: 115). In some embodiments, the iCAR comprises a SIGLEC8 inhibitory domain (SEQ ID NO: 116). In some embodiments, the iCAR comprises a SIGLEC9 inhibitory domain (SEQ ID NO: 117). In some embodiments, the iCAR comprises a SIGLEC10 inhibitory domain (SEQ ID NO: 118). In some embodiments, the iCAR comprises a SIGLEC11 inhibitory domain (SEQ ID NO: 119). In some embodiments, the iCAR comprises a SIGLEC12 inhibitory domain (SEQ ID NO:120). In some embodiments, the iCAR comprises a PECAM1/CD31 inhibitory domain (SEQ ID NO:121). In some embodiments, the iCAR comprises a CD200R1 inhibitory domain (SEQ ID NO:122). In some embodiments, the iCAR comprises a FCRL1 inhibitory domain (SEQ ID NO:123). In some embodiments, the iCAR comprises a FCRL2 inhibitory domain (SEQ ID NO:124). In some embodiments, the iCAR comprises a FCRL3 inhibitory domain (SEQ ID NO:125). In some embodiments, the iCAR comprises a FCRL4 inhibitory domain (SEQ ID NO:126). In some embodiments, the iCAR comprises a FCRL5 inhibitory domain (SEQ ID NO:127). In some embodiments, the iCAR comprises a SLAMF1 inhibitory domain (SEQ ID NO:128). In some embodiments, the iCAR comprises a SLAMF5 inhibitory domain (SEQ ID NO:129). In some embodiments, the iCAR comprises a BTLA inhibitory domain (SEQ ID NO:130). In some embodiments, the iCAR comprises a LAG3 inhibitory domain (SEQ ID NO:131). In some embodiments, the iCAR comprises a 2B4 inhibitory domain (SEQ ID NO:132). In some embodiments, the iCAR comprises a CD160 inhibitory domain (SEQ ID NO:133). In some embodiments, the iCAR comprises a CEACAM1 inhibitory domain (SEQ ID NO:134). In some embodiments, the iCAR comprises a TIM3 inhibitory domain (SEQ ID NO:135). In some embodiments, the iCAR comprises a VISTA inhibitory domain (SEQ ID NO:136). In some embodiments, the iCAR comprises a TIGIT inhibitory domain (SEQ ID NO:137). In some embodiments, the iCAR comprises a SIRPalpha inhibitory domain (SEQ ID NO:138). In some embodiments, the iCAR comprises a FcγRIIB inhibitory domain (SEQ ID NO:139). In some embodiments, the iCAR comprises a CD5 inhibitory domain (SEQ ID NO:140). In some embodiments, the iCAR comprises a CD300a inhibitory domain (SEQ ID NO:141). In some embodiments, the iCAR comprises a CD300f inhibitory domain (SEQ ID NO:142). In some embodiments, the iCAR comprises a LIR1 inhibitory domain (SEQ ID NO:143). In some embodiments, the iCAR comprises a LIR2 inhibitory domain (SEQ ID NO:144). In some embodiments, the iCAR comprises a LIR3 inhibitory domain (SEQ ID NO:145). In some embodiments, the iCAR comprises a LIR5 inhibitory domain (SEQ ID NO:146). In some embodiments, the iCAR comprises a LIR8 inhibitory domain (SEQ ID NO:147). In some embodiments, the iCAR comprises a Ly9 inhibitory domain (SEQ ID NO:148). In some embodiments, the iCAR comprises a 2xPD1(G4S) inhibitory domain (SEQ ID NO:149). In some embodiments, the iCAR comprises a 2xPD1(PD1) inhibitory domain (SEQ ID NO:150). In some embodiments, the iCAR comprises a PVRIg inhibitory domain (SEQ ID NO:151). In some embodiments, the iCAR comprises an AA2AR inhibitory domain (SEQ ID NO:152). In some embodiments, the iCAR comprises a signal peptide upstream of the iCAR portion, wherein the signal peptide is a CD8 alpha signal peptide (SEQ ID NO: 161), a GM-CSF signal peptide (SEQ ID NO: 162), or a mIgK signal peptide (SEQ ID NO: 306).

[0344] In some embodiments, the iCAR comprises an scFv component comprising the VL and VH sequences of Hz.BB7.2 VH1-3_A18 (SEQ ID NOs: 69 and 70). In some embodiments, the orientation of the iCAR VH and VL regions is VH-VL. In some embodiments, the orientation of the iCAR VH and VL regions is VL-VH. In some embodiments, the iCAR scFv comprises a (G4S)X3 linker (SEQ ID NO:81) linker that covalently connects the VH and the VL to form the iCAR scFv. In some embodiments, the iCAR scFv comprises a Whitlow linker (SEQ ID NO:82) linker that covalently connects the VH and the VL to form the iCAR scFv. In some embodiments, the iCAR comprises a CD8 alpha hinge domain (SEQ ID NO:84). In some embodiments, the iCAR comprises a CD28 hinge domain (SEQ ID NO:85). In some embodiments, the iCAR comprises a PD-1 hinge domain (SEQ ID NO:86). In some embodiments, the iCAR comprises a LIR1 Ig3-4 hinge domain (SEQ ID NO:87). In some embodiments, the iCAR comprises a LIR1 Ig-4 hinge domain (SEQ ID NO:88). In some embodiments, the iCAR comprises a LIR1 52 aa hinge domain (SEQ ID NO:89). In some embodiments, the iCAR comprises a LIR1 36 aa hinge domain (SEQ ID NO:90). In some embodiments, the iCAR comprises a LIR1 30 aa hinge domain (SEQ ID NO:91). In some embodiments, the iCAR comprises a LIR1 8 aa hinge domain (SEQ ID NO:92). In some embodiments, the iCAR comprises a CD33 hinge domain (SEQ ID NO:93). In some embodiments, the iCAR comprises a KIR2DL1 hinge domain (SEQ ID NO:94). In some embodiments, the iCAR comprises aLIR1 26 aa hinge domain (SEQ ID NO: 289). In some embodiments, the iCAR comprises PD-1 (47) hinge domain (SEQ ID NO: 290). In some embodiments, the iCAR comprises PD-1 (42) hinge domain (SEQ ID NO: 291). In some embodiments, the iCAR comprises PD-1 (36) hinge domain (SEQ ID NO: 292). In some embodiments, the iCAR comprises PD-1 (30) hinge domain (SEQ ID NO: 293). In some embodiments, the iCAR comprises PD-1 (26) hinge domain (SEQ ID NO: 294). In some embodiments, the iCAR comprises PD-1 (20) hinge domain (SEQ ID NO: 295). In some embodiments, the iCAR comprises a CD8 alpha transmembrane domain (SEQ ID NO:95). In some embodiments, the iCAR comprises a CD28 transmembrane domain (SEQ ID NO:96). In some embodiments, the iCAR comprises a PD-1 transmembrane domain (SEQ ID NO:97). In some embodiments, the iCAR comprises a LIR1 transmembrane domain (SEQ ID NO:98). In some embodiments, the iCAR comprises a CD33 transmembrane domain (SEQ ID NO:99). In some embodiments, the iCAR comprises a KIR2DL1 transmembrane domain (SEQ ID NO:100). In some embodiments, the iCAR comprises a PD-1 inhibitory domain (SEQ ID NO:101). In some embodiments, the iCAR comprises a KIR2DL1 inhibitory domain (SEQ ID NO:102). In some embodiments, the iCAR comprises a KIR2DL2 inhibitory domain (SEQ ID NO:103). In some embodiments, the iCAR comprises a KIR2DL3 inhibitory domain (SEQ ID NO:104). In some embodiments, the iCAR comprises a KIR2DL4 inhibitory domain (SEQ ID NO:105). In some embodiments, the iCAR comprises a KIR2DL5A inhibitory domain (SEQ ID NO:106). In some embodiments, the iCAR comprises a KIR3DL1 inhibitory domain (SEQ ID NO:107). In some embodiments, the iCAR comprises a KIR3DL2 inhibitory domain (SEQ ID NO:108). In some embodiments, the iCAR comprises a KIR3DL3 inhibitory domain (SEQ ID NO:109). In some embodiments, the iCAR comprises a LAIR1 inhibitory domain (SEQ ID NO:110). In some embodiments, the iCAR comprises a CD22 inhibitory domain (SEQ ID NO:111). In some embodiments, the iCAR comprises a CD33 inhibitory domain (SEQ ID NO:112). In some embodiments, the iCAR comprises a SIGLEC5 inhibitory domain (SEQ ID NO: 113). In some embodiments, the iCAR comprises a SIGLEC6 inhibitory domain (SEQ ID NO:114). In some embodiments, the iCAR comprises a SIGLEC7 inhibitory domain (SEQ ID NO: 115). In some embodiments, the iCAR comprises a SIGLEC8 inhibitory domain (SEQ ID NO: 116). In some embodiments, the iCAR comprises a SIGLEC9 inhibitory domain (SEQ ID NO: 117). In some embodiments, the iCAR comprises a SIGLEC10 inhibitory domain (SEQ ID NO: 118). In some embodiments, the iCAR comprises a SIGLEC11 inhibitory domain (SEQ ID NO: 119). In some embodiments, the iCAR comprises a SIGLEC12 inhibitory domain (SEQ ID NO:120). In some embodiments, the iCAR comprises a PECAM1/CD31 inhibitory domain (SEQ ID NO:121). In some embodiments, the iCAR comprises a CD200R1 inhibitory domain (SEQ ID NO:122). In some embodiments, the iCAR comprises a FCRL1 inhibitory domain (SEQ ID NO:123). In some embodiments, the iCAR comprises a FCRL2 inhibitory domain (SEQ ID NO:124). In some embodiments, the iCAR comprises a FCRL3 inhibitory domain (SEQ ID NO:125). In some embodiments, the iCAR comprises a FCRL4 inhibitory domain (SEQ ID NO:126). In some embodiments, the iCAR comprises a FCRL5 inhibitory domain (SEQ ID NO:127). In some embodiments, the iCAR comprises a SLAMF1 inhibitory domain (SEQ ID NO:128). In some embodiments, the iCAR comprises a SLAMF5 inhibitory domain (SEQ ID NO:129). In some embodiments, the iCAR comprises a BTLA inhibitory domain (SEQ ID NO:130). In some embodiments, the iCAR comprises a LAG3 inhibitory domain (SEQ ID NO:131). In some embodiments, the iCAR comprises a 2B4 inhibitory domain (SEQ ID NO:132). In some embodiments, the iCAR comprises a CD160 inhibitory domain (SEQ ID NO:133). In some embodiments, the iCAR comprises a CEACAM1 inhibitory domain (SEQ ID NO:134). In some embodiments, the iCAR comprises a TIM3 inhibitory domain (SEQ ID NO:135). In some embodiments, the iCAR comprises a VISTA inhibitory domain (SEQ ID NO:136). In some embodiments, the iCAR comprises a TIGIT inhibitory domain (SEQ ID NO:137). In some embodiments, the iCAR comprises a SIRPalpha inhibitory domain (SEQ ID NO:138). In some embodiments, the iCAR comprises a FcγRIIB inhibitory domain (SEQ ID NO:139). In some embodiments, the iCAR comprises a CD5 inhibitory domain (SEQ ID NO:140). In some embodiments, the iCAR comprises a CD300a inhibitory domain (SEQ ID NO:141). In some embodiments, the iCAR comprises a CD300f inhibitory domain (SEQ ID NO:142). In some embodiments, the iCAR comprises a LIR1 inhibitory domain (SEQ ID NO:143). In some embodiments, the iCAR comprises a LIR2 inhibitory domain (SEQ ID NO:144). In some embodiments, the iCAR comprises a LIR3 inhibitory domain (SEQ ID NO:145). In some embodiments, the iCAR comprises a LIR5 inhibitory domain (SEQ ID NO:146). In some embodiments, the iCAR comprises a LIR8 inhibitory domain (SEQ ID NO:147). In some embodiments, the iCAR comprises a Ly9 inhibitory domain (SEQ ID NO:148). In some embodiments, the iCAR comprises a 2xPD1(G4S) inhibitory domain (SEQ ID NO:149). In some embodiments, the iCAR comprises a 2xPD1(PD1) inhibitory domain (SEQ ID NO:150). In some embodiments, the iCAR comprises a PVRIg inhibitory domain (SEQ ID NO:151). In some embodiments, the iCAR comprises an AA2AR inhibitory domain (SEQ ID NO:152). In some embodiments, the iCAR comprises a signal peptide upstream of the iCAR portion, wherein the signal peptide is a CD8 alpha signal peptide (SEQ ID NO: 161), a GM-CSF signal peptide (SEQ ID NO: 162), or a mIgK signal peptide (SEQ ID NO: 306).

[0345] In some embodiments, the iCAR comprises an scFv component comprising the VL and VH sequences of Hz.BB7.2 VH1-3(48)_A18 (SEQ ID NOs: 71 and 72). In some embodiments, the orientation of the iCAR VH and VL regions is VH-VL. In some embodiments, the orientation of the iCAR VH and VL regions is VL-VH. In some embodiments, the iCAR scFv comprises a (G4S)X3 linker (SEQ ID NO:81) linker that covalently connects the VH and the VL to form the iCAR scFv. In some embodiments, the iCAR scFv comprises a Whitlow linker (SEQ ID NO:82) linker that covalently connects the VH and the VL to form the iCAR scFv. In some embodiments, the iCAR comprises a CD8 alpha hinge domain (SEQ ID NO:84). In some embodiments, the iCAR comprises a CD28 hinge domain (SEQ ID NO:85). In some embodiments, the iCAR comprises a PD-1 hinge domain (SEQ ID NO:86). In some embodiments, the iCAR comprises a LIR1 Ig3-4 hinge domain (SEQ ID NO:87). In some embodiments, the iCAR comprises a LIR1 Ig-4 hinge domain (SEQ ID NO:88). In some embodiments, the iCAR comprises a LIR1 52 aa hinge domain (SEQ ID NO:89). In some embodiments, the iCAR comprises a LIR1 36 aa hinge domain (SEQ ID NO:90). In some embodiments, the iCAR comprises a LIR1 30 aa hinge domain (SEQ ID NO:91). In some embodiments, the iCAR comprises a LIR1 8 aa hinge domain (SEQ ID NO:92). In some embodiments, the iCAR comprises a CD33 hinge domain (SEQ ID NO:93). In some embodiments, the iCAR comprises a KIR2DL1 hinge domain (SEQ ID NO:94). In some embodiments, the iCAR comprises aLIR1 26 aa hinge domain (SEQ ID NO: 289). In some embodiments, the iCAR comprises PD-1 (47) hinge domain (SEQ ID NO: 290). In some embodiments, the iCAR comprises PD-1 (42) hinge domain (SEQ ID NO: 291). In some embodiments, the iCAR comprises PD-1 (36) hinge domain (SEQ ID NO: 292). In some embodiments, the iCAR comprises PD-1 (30) hinge domain (SEQ ID NO: 293). In some embodiments, the iCAR comprises PD-1 (26) hinge domain (SEQ ID NO: 294). In some embodiments, the iCAR comprises PD-1 (20) hinge domain (SEQ ID NO: 295). In some embodiments, the iCAR comprises a CD8 alpha transmembrane domain (SEQ ID NO:95). In some embodiments, the iCAR comprises a CD28 transmembrane domain (SEQ ID NO:96). In some embodiments, the iCAR comprises a PD-1 transmembrane domain (SEQ ID NO:97). In some embodiments, the iCAR comprises a LIR1 transmembrane domain (SEQ ID NO:98). In some embodiments, the iCAR comprises a CD33 transmembrane domain (SEQ ID NO:99). In some embodiments, the iCAR comprises a KIR2DL1 transmembrane domain (SEQ ID NO:100). In some embodiments, the iCAR comprises a PD-1 inhibitory domain (SEQ ID NO:101). In some embodiments, the iCAR comprises a KIR2DL1 inhibitory domain (SEQ ID NO:102). In some embodiments, the iCAR comprises a KIR2DL2 inhibitory domain (SEQ ID NO:103). In some embodiments, the iCAR comprises a KIR2DL3 inhibitory domain (SEQ ID NO:104). In some embodiments, the iCAR comprises a KIR2DL4 inhibitory domain (SEQ ID NO:105). In some embodiments, the iCAR comprises a KIR2DL5A inhibitory domain (SEQ ID NO:106). In some embodiments, the iCAR comprises a KIR3DL1 inhibitory domain (SEQ ID NO:107). In some embodiments, the iCAR comprises a KIR3DL2 inhibitory domain (SEQ ID NO:108). In some embodiments, the iCAR comprises a KIR3DL3 inhibitory domain (SEQ ID NO:109). In some embodiments, the iCAR comprises a LAIR1 inhibitory domain (SEQ ID NO:110). In some embodiments, the iCAR comprises a CD22 inhibitory domain (SEQ ID NO:111). In some embodiments, the iCAR comprises a CD33 inhibitory domain (SEQ ID NO:112). In some embodiments, the iCAR comprises a SIGLEC5 inhibitory domain (SEQ ID NO: 113). In some embodiments, the iCAR comprises a SIGLEC6 inhibitory domain (SEQ ID NO:114). In some embodiments, the iCAR comprises a SIGLEC7 inhibitory domain (SEQ ID NO: 115). In some embodiments, the iCAR comprises a SIGLEC8 inhibitory domain (SEQ ID NO: 116). In some embodiments, the iCAR comprises a SIGLEC9 inhibitory domain (SEQ ID NO: 117). In some embodiments, the iCAR comprises a SIGLEC10 inhibitory domain (SEQ ID NO: 118). In some embodiments, the iCAR comprises a SIGLEC11 inhibitory domain (SEQ ID NO: 119). In some embodiments, the iCAR comprises a SIGLEC12 inhibitory domain (SEQ ID NO:120). In some embodiments, the iCAR comprises a PECAM1/CD31 inhibitory domain (SEQ ID NO:121). In some embodiments, the iCAR comprises a CD200R1 inhibitory domain (SEQ ID NO:122). In some embodiments, the iCAR comprises a FCRL1 inhibitory domain (SEQ ID NO:123). In some embodiments, the iCAR comprises a FCRL2 inhibitory domain (SEQ ID NO:124). In some embodiments, the iCAR comprises a FCRL3 inhibitory domain (SEQ ID NO:125). In some embodiments, the iCAR comprises a FCRL4 inhibitory domain (SEQ ID NO:126). In some embodiments, the iCAR comprises a FCRL5 inhibitory domain (SEQ ID NO:127). In some embodiments, the iCAR comprises a SLAMF1 inhibitory domain (SEQ ID NO:128). In some embodiments, the iCAR comprises a SLAMF5 inhibitory domain (SEQ ID NO:129). In some embodiments, the iCAR comprises a BTLA inhibitory domain (SEQ ID NO:130). In some embodiments, the iCAR comprises a LAG3 inhibitory domain (SEQ ID NO:131). In some embodiments, the iCAR comprises a 2B4 inhibitory domain (SEQ ID NO:132). In some embodiments, the iCAR comprises a CD160 inhibitory domain (SEQ ID NO:133). In some embodiments, the iCAR comprises a CEACAM1 inhibitory domain (SEQ ID NO:134). In some embodiments, the iCAR comprises a TIM3 inhibitory domain (SEQ ID NO:135). In some embodiments, the iCAR comprises a VISTA inhibitory domain (SEQ ID NO:136). In some embodiments, the iCAR comprises a TIGIT inhibitory domain (SEQ ID NO:137). In some embodiments, the iCAR comprises a SIRPalpha inhibitory domain (SEQ ID NO:138). In some embodiments, the iCAR comprises a FcγRIIB inhibitory domain (SEQ ID NO:139). In some embodiments, the iCAR comprises a CD5 inhibitory domain (SEQ ID NO:140). In some embodiments, the iCAR comprises a CD300a inhibitory domain (SEQ ID NO:141). In some embodiments, the iCAR comprises a CD300f inhibitory domain (SEQ ID NO:142). In some embodiments, the iCAR comprises a LIR1 inhibitory domain (SEQ ID NO:143). In some embodiments, the iCAR comprises a LIR2 inhibitory domain (SEQ ID NO:144). In some embodiments, the iCAR comprises a LIR3 inhibitory domain (SEQ ID NO:145). In some embodiments, the iCAR comprises a LIR5 inhibitory domain (SEQ ID NO:146). In some embodiments, the iCAR comprises a LIR8 inhibitory domain (SEQ ID NO:147). In some embodiments, the iCAR comprises a Ly9 inhibitory domain (SEQ ID NO:148). In some embodiments, the iCAR comprises a 2xPD1(G4S) inhibitory domain (SEQ ID NO:149). In some embodiments, the iCAR comprises a 2xPD1(PD1) inhibitory domain (SEQ ID NO:150). In some embodiments, the iCAR comprises a PVRIg inhibitory domain (SEQ ID NO:151). In some embodiments, the iCAR comprises an AA2AR inhibitory domain (SEQ ID NO:152). In some embodiments, the iCAR comprises a signal peptide upstream of the iCAR portion, wherein the signal peptide is a CD8 alpha signal peptide (SEQ ID NO: 161), a GM-CSF signal peptide (SEQ ID NO: 162), or a mIgK signal peptide (SEQ ID NO: 306).

[0346] In some embodiments, the iCAR comprises an scFv component comprising the VL and VH sequences of Hz.BB7.2 VH1-3(67)_A18 (SEQ ID NOs: 73 and 74). In some embodiments, the orientation of the iCAR VH and VL regions is VH-VL. In some embodiments, the orientation of the iCAR VH and VL regions is VL-VH. In some embodiments, the iCAR scFv comprises a (G4S)X3 linker (SEQ ID NO:81) linker that covalently connects the VH and the VL to form the iCAR scFv. In some embodiments, the iCAR scFv comprises a Whitlow linker (SEQ ID NO:82) linker that covalently connects the VH and the VL to form the iCAR scFv. In some embodiments, the iCAR comprises a CD8 alpha hinge domain (SEQ ID NO:84). In some embodiments, the iCAR comprises a CD28 hinge domain (SEQ ID NO:85). In some embodiments, the iCAR comprises a PD-1 hinge domain (SEQ ID NO:86). In some embodiments, the iCAR comprises a LIR1 Ig3-4 hinge domain (SEQ ID NO:87). In some embodiments, the iCAR comprises a LIR1 Ig-4 hinge domain (SEQ ID NO:88). In some embodiments, the iCAR comprises a LIR1 52 aa hinge domain (SEQ ID NO:89). In some embodiments, the iCAR comprises a LIR1 36 aa hinge domain (SEQ ID NO:90). In some embodiments, the iCAR comprises a LIR1 30 aa hinge domain (SEQ ID NO:91). In some embodiments, the iCAR comprises a LIR1 8 aa hinge domain (SEQ ID NO:92). In some embodiments, the iCAR comprises a CD33 hinge domain (SEQ ID NO:93). In some embodiments, the iCAR comprises a KIR2DL1 hinge domain (SEQ ID NO:94). In some embodiments, the iCAR comprises aLIR1 26 aa hinge domain (SEQ ID NO: 289). In some embodiments, the iCAR comprises PD-1 (47) hinge domain (SEQ ID NO: 290). In some embodiments, the iCAR comprises PD-1 (42) hinge domain (SEQ ID NO: 291). In some embodiments, the iCAR comprises PD-1 (36) hinge domain (SEQ ID NO: 292). In some embodiments, the iCAR comprises PD-1 (30) hinge domain (SEQ ID NO: 293). In some embodiments, the iCAR comprises PD-1 (26) hinge domain (SEQ ID NO: 294). In some embodiments, the iCAR comprises PD-1 (20) hinge domain (SEQ ID NO: 295). In some embodiments, the iCAR comprises a CD8 alpha transmembrane domain (SEQ ID NO:95). In some embodiments, the iCAR comprises a CD28 transmembrane domain (SEQ ID NO:96). In some embodiments, the iCAR comprises a PD-1 transmembrane domain (SEQ ID NO:97). In some embodiments, the iCAR comprises a LIR1 transmembrane domain (SEQ ID NO:98). In some embodiments, the iCAR comprises a CD33 transmembrane domain (SEQ ID NO:99). In some embodiments, the iCAR comprises a KIR2DL1 transmembrane domain (SEQ ID NO:100). In some embodiments, the iCAR comprises a PD-1 inhibitory domain (SEQ ID NO:101). In some embodiments, the iCAR comprises a KIR2DL1 inhibitory domain (SEQ ID NO:102). In some embodiments, the iCAR comprises a KIR2DL2 inhibitory domain (SEQ ID NO:103). In some embodiments, the iCAR comprises a KIR2DL3 inhibitory domain (SEQ ID NO:104). In some embodiments, the iCAR comprises a KIR2DL4 inhibitory domain (SEQ ID NO:105). In some embodiments, the iCAR comprises a KIR2DL5A inhibitory domain (SEQ ID NO:106). In some embodiments, the iCAR comprises a KIR3DL1 inhibitory domain (SEQ ID NO:107). In some embodiments, the iCAR comprises a KIR3DL2 inhibitory domain (SEQ ID NO:108). In some embodiments, the iCAR comprises a KIR3DL3 inhibitory domain (SEQ ID NO:109). In some embodiments, the iCAR comprises a LAIR1 inhibitory domain (SEQ ID NO:110). In some embodiments, the iCAR comprises a CD22 inhibitory domain (SEQ ID NO:111). In some embodiments, the iCAR comprises a CD33 inhibitory domain (SEQ ID NO:112). In some embodiments, the iCAR comprises a SIGLEC5 inhibitory domain (SEQ ID NO: 113). In some embodiments, the iCAR comprises a SIGLEC6 inhibitory domain (SEQ ID NO:114). In some embodiments, the iCAR comprises a SIGLEC7 inhibitory domain (SEQ ID NO: 115). In some embodiments, the iCAR comprises a SIGLEC8 inhibitory domain (SEQ ID NO: 116). In some embodiments, the iCAR comprises a SIGLEC9 inhibitory domain (SEQ ID NO:117). In some embodiments, the iCAR comprises a SIGLEC10 inhibitory domain (SEQ ID NO: 118). In some embodiments, the iCAR comprises a SIGLEC11 inhibitory domain (SEQ ID NO: 119). In some embodiments, the iCAR comprises a SIGLEC12 inhibitory domain (SEQ ID NO:120). In some embodiments, the iCAR comprises a PECAM1/CD31 inhibitory domain (SEQ ID NO:121). In some embodiments, the iCAR comprises a CD200R1 inhibitory domain (SEQ ID NO:122). In some embodiments, the iCAR comprises a FCRL1 inhibitory domain (SEQ ID NO:123). In some embodiments, the iCAR comprises a FCRL2 inhibitory domain (SEQ ID NO:124). In some embodiments, the iCAR comprises a FCRL3 inhibitory domain (SEQ ID NO:125). In some embodiments, the iCAR comprises a FCRL4 inhibitory domain (SEQ ID NO:126). In some embodiments, the iCAR comprises a FCRL5 inhibitory domain (SEQ ID NO:127). In some embodiments, the iCAR comprises a SLAMF1 inhibitory domain (SEQ ID NO:128). In some embodiments, the iCAR comprises a SLAMF5 inhibitory domain (SEQ ID NO:129). In some embodiments, the iCAR comprises a BTLA inhibitory domain (SEQ ID NO:130). In some embodiments, the iCAR comprises a LAG3 inhibitory domain (SEQ ID NO:131). In some embodiments, the iCAR comprises a 2B4 inhibitory domain (SEQ ID NO:132). In some embodiments, the iCAR comprises a CD160 inhibitory domain (SEQ ID NO:133). In some embodiments, the iCAR comprises a CEACAM1 inhibitory domain (SEQ ID NO:134). In some embodiments, the iCAR comprises a TIM3 inhibitory domain (SEQ ID NO:135). In some embodiments, the iCAR comprises a VISTA inhibitory domain (SEQ ID NO:136). In some embodiments, the iCAR comprises a TIGIT inhibitory domain (SEQ ID NO:137). In some embodiments, the iCAR comprises a SIRPalpha inhibitory domain (SEQ ID NO:138). In some embodiments, the iCAR comprises a FcγRIIB inhibitory domain (SEQ ID NO:139). In some embodiments, the iCAR comprises a CD5 inhibitory domain (SEQ ID NO:140). In some embodiments, the iCAR comprises a CD300a inhibitory domain (SEQ ID NO:141). In some embodiments, the iCAR comprises a CD300f inhibitory domain (SEQ ID NO:142). In some embodiments, the iCAR comprises a LIR1 inhibitory domain (SEQ ID NO:143). In some embodiments, the iCAR comprises a LIR2 inhibitory domain (SEQ ID NO:144). In some embodiments, the iCAR comprises a LIR3 inhibitory domain (SEQ ID NO:145). In some embodiments, the iCAR comprises a LIR5 inhibitory domain (SEQ ID NO:146). In some embodiments, the iCAR comprises a LIR8 inhibitory domain (SEQ ID NO:147). In some embodiments, the iCAR comprises a Ly9 inhibitory domain (SEQ ID NO:148). In some embodiments, the iCAR comprises a 2xPD1(G4S) inhibitory domain (SEQ ID NO:149). In some embodiments, the iCAR comprises a 2xPD1(PD1) inhibitory domain (SEQ ID NO:150). In some embodiments, the iCAR comprises a PVRIg inhibitory domain (SEQ ID NO:151). In some embodiments, the iCAR comprises an AA2AR inhibitory domain (SEQ ID NO:152). In some embodiments, the iCAR comprises a signal peptide upstream of the iCAR portion, wherein the signal peptide is a CD8 alpha signal peptide (SEQ ID NO: 161), a GM-CSF signal peptide (SEQ ID NO: 162), or a mIgK signal peptide (SEQ ID NO: 306).

[0347] In some embodiments, the iCAR comprises an scFv component comprising the VL and VH sequences of Hz.Bb7.2 VH1-3(69)_A18 (SEQ ID NOs: 75 and 76). In some embodiments, the orientation of the iCAR VH and VL regions is VH-VL. In some embodiments, the orientation of the iCAR VH and VL regions is VL-VH. In some embodiments, the iCAR scFv comprises a (G4S)X3 linker (SEQ ID NO:81) linker that covalently connects the VH and the VL to form the iCAR scFv. In some embodiments, the iCAR scFv comprises a Whitlow linker (SEQ ID NO:82) linker that covalently connects the VH and the VL to form the iCAR scFv. In some embodiments, the iCAR comprises a CD8 alpha hinge domain (SEQ ID NO:84). In some embodiments, the iCAR comprises a CD28 hinge domain (SEQ ID NO:85). In some embodiments, the iCAR comprises a PD-1 hinge domain (SEQ ID NO:86). In some embodiments, the iCAR comprises a LIR1 Ig3-4 hinge domain (SEQ ID NO:87). In some embodiments, the iCAR comprises a LIR1 Ig-4 hinge domain (SEQ ID NO:88). In some embodiments, the iCAR comprises a LIR1 52 aa hinge domain (SEQ ID NO:89). In some embodiments, the iCAR comprises a LIR1 36 aa hinge domain (SEQ ID NO:90). In some embodiments, the iCAR comprises a LIR1 30 aa hinge domain (SEQ ID NO:91). In some embodiments, the iCAR comprises a LIR1 8 aa hinge domain (SEQ ID NO:92). In some embodiments, the iCAR comprises a CD33 hinge domain (SEQ ID NO:93). In some embodiments, the iCAR comprises a KIR2DL1 hinge domain (SEQ ID NO:94). In some embodiments, the iCAR comprises aLIR1 26 aa hinge domain (SEQ ID NO: 289). In some embodiments, the iCAR comprises PD-1 (47) hinge domain (SEQ ID NO: 290). In some embodiments, the iCAR comprises PD-1 (42) hinge domain (SEQ ID NO: 291). In some embodiments, the iCAR comprises PD-1 (36) hinge domain (SEQ ID NO: 292). In some embodiments, the iCAR comprises PD-1 (30) hinge domain (SEQ ID NO: 293). In some embodiments, the iCAR comprises PD-1 (26) hinge domain (SEQ ID NO: 294). In some embodiments, the iCAR comprises PD-1 (20) hinge domain (SEQ ID NO: 295). In some embodiments, the iCAR comprises a CD8 alpha transmembrane domain (SEQ ID NO:95). In some embodiments, the iCAR comprises a CD28 transmembrane domain (SEQ ID NO:96). In some embodiments, the iCAR comprises a PD-1 transmembrane domain (SEQ ID NO:97). In some embodiments, the iCAR comprises a LIR1 transmembrane domain (SEQ ID NO:98). In some embodiments, the iCAR comprises a CD33 transmembrane domain (SEQ ID NO:99). In some embodiments, the iCAR comprises a KIR2DL1 transmembrane domain (SEQ ID NO:100). In some embodiments, the iCAR comprises a PD-1 inhibitory domain (SEQ ID NO:101). In some embodiments, the iCAR comprises a KIR2DL1 inhibitory domain (SEQ ID NO:102). In some embodiments, the iCAR comprises a KIR2DL2 inhibitory domain (SEQ ID NO:103). In some embodiments, the iCAR comprises a KIR2DL3 inhibitory domain (SEQ ID NO:104). In some embodiments, the iCAR comprises a KIR2DL4 inhibitory domain (SEQ ID NO:105). In some embodiments, the iCAR comprises a KIR2DL5A inhibitory domain (SEQ ID NO:106). In some embodiments, the iCAR comprises a KIR3DL1 inhibitory domain (SEQ ID NO:107). In some embodiments, the iCAR comprises a KIR3DL2 inhibitory domain (SEQ ID NO:108). In some embodiments, the iCAR comprises a KIR3DL3 inhibitory domain (SEQ ID NO:109). In some embodiments, the iCAR comprises a LAIR1 inhibitory domain (SEQ ID NO:110). In some embodiments, the iCAR comprises a CD22 inhibitory domain (SEQ ID NO:111). In some embodiments, the iCAR comprises a CD33 inhibitory domain (SEQ ID NO:112). In some embodiments, the iCAR comprises a SIGLEC5 inhibitory domain (SEQ ID NO: 113). In some embodiments, the iCAR comprises a SIGLEC6 inhibitory domain (SEQ ID NO:114). In some embodiments, the iCAR comprises a SIGLEC7 inhibitory domain (SEQ ID NO: 115). In some embodiments, the iCAR comprises a SIGLEC8 inhibitory domain (SEQ ID NO: 116). In some embodiments, the iCAR comprises a SIGLEC9 inhibitory domain (SEQ ID NO:117). In some embodiments, the iCAR comprises a SIGLEC10 inhibitory domain (SEQ ID NO: 118). In some embodiments, the iCAR comprises a SIGLEC11 inhibitory domain (SEQ ID NO: 119). In some embodiments, the iCAR comprises a SIGLEC12 inhibitory domain (SEQ ID NO:120). In some embodiments, the iCAR comprises a PECAM1/CD31 inhibitory domain (SEQ ID NO:121). In some embodiments, the iCAR comprises a CD200R1 inhibitory domain (SEQ ID NO:122). In some embodiments, the iCAR comprises a FCRL1 inhibitory domain (SEQ ID NO:123). In some embodiments, the iCAR comprises a FCRL2 inhibitory domain (SEQ ID NO:124). In some embodiments, the iCAR comprises a FCRL3 inhibitory domain (SEQ ID NO:125). In some embodiments, the iCAR comprises a FCRL4 inhibitory domain (SEQ ID NO:126). In some embodiments, the iCAR comprises a FCRL5 inhibitory domain (SEQ ID NO:127). In some embodiments, the iCAR comprises a SLAMF1 inhibitory domain (SEQ ID NO:128). In some embodiments, the iCAR comprises a SLAMF5 inhibitory domain (SEQ ID NO:129). In some embodiments, the iCAR comprises a BTLA inhibitory domain (SEQ ID NO:130). In some embodiments, the iCAR comprises a LAG3 inhibitory domain (SEQ ID NO:131). In some embodiments, the iCAR comprises a 2B4 inhibitory domain (SEQ ID NO:132). In some embodiments, the iCAR comprises a CD160 inhibitory domain (SEQ ID NO:133). In some embodiments, the iCAR comprises a CEACAM1 inhibitory domain (SEQ ID NO:134). In some embodiments, the iCAR comprises a TIM3 inhibitory domain (SEQ ID NO:135). In some embodiments, the iCAR comprises a VISTA inhibitory domain (SEQ ID NO:136). In some embodiments, the iCAR comprises a TIGIT inhibitory domain (SEQ ID NO:137). In some embodiments, the iCAR comprises a SIRPalpha inhibitory domain (SEQ ID NO:138). In some embodiments, the iCAR comprises a FcγRIIB inhibitory domain (SEQ ID NO:139). In some embodiments, the iCAR comprises a CD5 inhibitory domain (SEQ ID NO:140). In some embodiments, the iCAR comprises a CD300a inhibitory domain (SEQ ID NO:141). In some embodiments, the iCAR comprises a CD300f inhibitory domain (SEQ ID NO:142). In some embodiments, the iCAR comprises a LIR1 inhibitory domain (SEQ ID NO:143). In some embodiments, the iCAR comprises a LIR2 inhibitory domain (SEQ ID NO:144). In some embodiments, the iCAR comprises a LIR3 inhibitory domain (SEQ ID NO:145). In some embodiments, the iCAR comprises a LIR5 inhibitory domain (SEQ ID NO:146). In some embodiments, the iCAR comprises a LIR8 inhibitory domain (SEQ ID NO:147). In some embodiments, the iCAR comprises a Ly9 inhibitory domain (SEQ ID NO:148). In some embodiments, the iCAR comprises a 2xPD1(G4S) inhibitory domain (SEQ ID NO:149). In some embodiments, the iCAR comprises a 2xPD1(PD1) inhibitory domain (SEQ ID NO:150). In some embodiments, the iCAR comprises a PVRIg inhibitory domain (SEQ ID NO:151). In some embodiments, the iCAR comprises an AA2AR inhibitory domain (SEQ ID NO:152). In some embodiments, the iCAR comprises a signal peptide upstream of the iCAR portion, wherein the signal peptide is a CD8 alpha signal peptide (SEQ ID NO: 161), a GM-CSF signal peptide (SEQ ID NO: 162), or a mIgK signal peptide (SEQ ID NO: 306).

[0348] In some embodiments, the scFv has the VL and VH sequences of Hz.BB7.2 VH1-3(71)_A18 (SEQ ID NOs: 77 and 78). In some embodiments, the orientation of the iCAR VH and VL regions is VH-VL. In some embodiments, the orientation of the iCAR VH and VL regions is VL-VH. In some embodiments, the iCAR scFv comprises a (G4S)X3 linker (SEQ ID NO:81) linker that covalently connects the VH and the VL to form the iCAR scFv. In some embodiments, the iCAR scFv comprises a Whitlow linker (SEQ ID NO:82) linker that covalently connects the VH and the VL to form the iCAR scFv. In some embodiments, the iCAR comprises a CD8 alpha hinge domain (SEQ ID NO:84). In some embodiments, the iCAR comprises a CD28 hinge domain (SEQ ID NO:85). In some embodiments, the iCAR comprises a PD-1 hinge domain (SEQ ID NO:86). In some embodiments, the iCAR comprises a LIR1 Ig3-4 hinge domain (SEQ ID NO:87). In some embodiments, the iCAR comprises a LIR1 Ig-4 hinge domain (SEQ ID NO:88). In some embodiments, the iCAR comprises a LIR1 52 aa hinge domain (SEQ ID NO:89). In some embodiments, the iCAR comprises a LIR1 36 aa hinge domain (SEQ ID NO:90). In some embodiments, the iCAR comprises a LIR1 30 aa hinge domain (SEQ ID NO:91). In some embodiments, the iCAR comprises a LIR1 8 aa hinge domain (SEQ ID NO:92). In some embodiments, the iCAR comprises a CD33 hinge domain (SEQ ID NO:93). In some embodiments, the iCAR comprises a KIR2DL1 hinge domain (SEQ ID NO:94). In some embodiments, the iCAR comprises aLIR1 26 aa hinge domain (SEQ ID NO: 289). In some embodiments, the iCAR comprises PD-1 (47) hinge domain (SEQ ID NO: 290). In some embodiments, the iCAR comprises PD-1 (42) hinge domain (SEQ ID NO: 291). In some embodiments, the iCAR comprises PD-1 (36) hinge domain (SEQ ID NO: 292). In some embodiments, the iCAR comprises PD-1 (30) hinge domain (SEQ ID NO: 293). In some embodiments, the iCAR comprises PD-1 (26) hinge domain (SEQ ID NO: 294). In some embodiments, the iCAR comprises PD-1 (20) hinge domain (SEQ ID NO: 295). In some embodiments, the iCAR comprises a CD8 alpha transmembrane domain (SEQ ID NO:95). In some embodiments, the iCAR comprises a CD28 transmembrane domain (SEQ ID NO:96). In some embodiments, the iCAR comprises a PD-1 transmembrane domain (SEQ ID NO:97). In some embodiments, the iCAR comprises a LIR1 transmembrane domain (SEQ ID NO:98). In some embodiments, the iCAR comprises a CD33 transmembrane domain (SEQ ID NO:99). In some embodiments, the iCAR comprises a KIR2DL1 transmembrane domain (SEQ ID NO:100). In some embodiments, the iCAR comprises a PD-1 inhibitory domain (SEQ ID NO:101). In some embodiments, the iCAR comprises a KIR2DL1 inhibitory domain (SEQ ID NO:102). In some embodiments, the iCAR comprises a KIR2DL2 inhibitory domain (SEQ ID NO:103). In some embodiments, the iCAR comprises a KIR2DL3 inhibitory domain (SEQ ID NO:104). In some embodiments, the iCAR comprises a KIR2DL4 inhibitory domain (SEQ ID NO:105). In some embodiments, the iCAR comprises a KIR2DL5A inhibitory domain (SEQ ID NO:106). In some embodiments, the iCAR comprises a KIR3DL1 inhibitory domain (SEQ ID NO:107). In some embodiments, the iCAR comprises a KIR3DL2 inhibitory domain (SEQ ID NO:108). In some embodiments, the iCAR comprises a KIR3DL3 inhibitory domain (SEQ ID NO:109). In some embodiments, the iCAR comprises a LAIR1 inhibitory domain (SEQ ID NO:110). In some embodiments, the iCAR comprises a CD22 inhibitory domain (SEQ ID NO:111). In some embodiments, the iCAR comprises a CD33 inhibitory domain (SEQ ID NO:112). In some embodiments, the iCAR comprises a SIGLEC5 inhibitory domain (SEQ ID NO: 113). In some embodiments, the iCAR comprises a SIGLEC6 inhibitory domain (SEQ ID NO:114). In some embodiments, the iCAR comprises a SIGLEC7 inhibitory domain (SEQ ID NO: 115). In some embodiments, the iCAR comprises a SIGLEC8 inhibitory domain (SEQ ID NO: 116). In some embodiments, the iCAR comprises a SIGLEC9 inhibitory domain (SEQ ID NO: 117). In some embodiments, the iCAR comprises a SIGLEC10 inhibitory domain (SEQ ID NO: 118). In some embodiments, the iCAR comprises a SIGLEC11 inhibitory domain (SEQ ID NO: 119). In some embodiments, the iCAR comprises a SIGLEC12 inhibitory domain (SEQ ID NO:120). In some embodiments, the iCAR comprises a PECAM1/CD31 inhibitory domain (SEQ ID NO:121). In some embodiments, the iCAR comprises a CD200R1 inhibitory domain (SEQ ID NO:122). In some embodiments, the iCAR comprises a FCRL1 inhibitory domain (SEQ ID NO:123). In some embodiments, the iCAR comprises a FCRL2 inhibitory domain (SEQ ID NO:124). In some embodiments, the iCAR comprises a FCRL3 inhibitory domain (SEQ ID NO:125). In some embodiments, the iCAR comprises a FCRL4 inhibitory domain (SEQ ID NO:126). In some embodiments, the iCAR comprises a FCRL5 inhibitory domain (SEQ ID NO:127). In some embodiments, the iCAR comprises a SLAMF1 inhibitory domain (SEQ ID NO:128). In some embodiments, the iCAR comprises a SLAMF5 inhibitory domain (SEQ ID NO:129). In some embodiments, the iCAR comprises a BTLA inhibitory domain (SEQ ID NO:130). In some embodiments, the iCAR comprises a LAG3 inhibitory domain (SEQ ID NO:131). In some embodiments, the iCAR comprises a 2B4 inhibitory domain (SEQ ID NO:132). In some embodiments, the iCAR comprises a CD160 inhibitory domain (SEQ ID NO:133). In some embodiments, the iCAR comprises a CEACAM1 inhibitory domain (SEQ ID NO:134). In some embodiments, the iCAR comprises a TIM3 inhibitory domain (SEQ ID NO:135). In some embodiments, the iCAR comprises a VISTA inhibitory domain (SEQ ID NO:136). In some embodiments, the iCAR comprises a TIGIT inhibitory domain (SEQ ID NO:137). In some embodiments, the iCAR comprises a SIRPalpha inhibitory domain (SEQ ID NO:138). In some embodiments, the iCAR comprises a FcγRIIB inhibitory domain (SEQ ID NO:139). In some embodiments, the iCAR comprises a CD5 inhibitory domain (SEQ ID NO:140). In some embodiments, the iCAR comprises a CD300a inhibitory domain (SEQ ID NO:141). In some embodiments, the iCAR comprises a CD300f inhibitory domain (SEQ ID NO:142). In some embodiments, the iCAR comprises a LIR1 inhibitory domain (SEQ ID NO:143). In some embodiments, the iCAR comprises a LIR2 inhibitory domain (SEQ ID NO:144). In some embodiments, the iCAR comprises a LIR3 inhibitory domain (SEQ ID NO:145). In some embodiments, the iCAR comprises a LIR5 inhibitory domain (SEQ ID NO:146). In some embodiments, the iCAR comprises a LIR8 inhibitory domain (SEQ ID NO:147). In some embodiments, the iCAR comprises a Ly9 inhibitory domain (SEQ ID NO:148). In some embodiments, the iCAR comprises a 2xPD1(G4S) inhibitory domain (SEQ ID NO:149). In some embodiments, the iCAR comprises a 2xPD1(PD1) inhibitory domain (SEQ ID NO:150). In some embodiments, the iCAR comprises a PVRIg inhibitory domain (SEQ ID NO:151). In some embodiments, the iCAR comprises an AA2AR inhibitory domain (SEQ ID NO:152). In some embodiments, the iCAR comprises a signal peptide upstream of the iCAR portion, wherein the signal peptide is a CD8 alpha signal peptide (SEQ ID NO: 161), a GM-CSF signal peptide (SEQ ID NO: 162), or a mIgK signal peptide (SEQ ID NO: 306).

[0349] In some embodiments, the iCAR comprises an scFv component comprising the VL and VH sequences of Hz. BB7.2VH1-3(73)_A18 (SEQ ID NOs: 79 and 80). In some embodiments, the orientation of the iCAR VH and VL regions is VH-VL. In some embodiments, the orientation of the iCAR VH and VL regions is VL-VH. In some embodiments, the iCAR scFv comprises a (G4S)X3 linker (SEQ ID NO:81) linker that covalently connects the VH and the VL to form the iCAR scFv. In some embodiments, the iCAR scFv comprises a Whitlow linker (SEQ ID NO:82) linker that covalently connects the VH and the VL to form the iCAR scFv. In some embodiments, the iCAR comprises a CD8 alpha hinge domain (SEQ ID NO:84). In some embodiments, the iCAR comprises a CD28 hinge domain (SEQ ID NO:85). In some embodiments, the iCAR comprises a PD-1 hinge domain (SEQ ID NO:86). In some embodiments, the iCAR comprises a LIR1 Ig3-4 hinge domain (SEQ ID NO:87). In some embodiments, the iCAR comprises a LIR1 Ig-4 hinge domain (SEQ ID NO:88). In some embodiments, the iCAR comprises a LIR1 52 aa hinge domain (SEQ ID NO:89). In some embodiments, the iCAR comprises a LIR1 36 aa hinge domain (SEQ ID NO:90). In some embodiments, the iCAR comprises a LIR1 30 aa hinge domain (SEQ ID NO:91). In some embodiments, the iCAR comprises a LIR1 8 aa hinge domain (SEQ ID NO:92). In some embodiments, the iCAR comprises a CD33 hinge domain (SEQ ID NO:93). In some embodiments, the iCAR comprises a KIR2DL1 hinge domain (SEQ ID NO:94). In some embodiments, the iCAR comprises aLIR1 26 aa hinge domain (SEQ ID NO: 289). In some embodiments, the iCAR comprises PD-1 (47) hinge domain (SEQ ID NO: 290). In some embodiments, the iCAR comprises PD-1 (42) hinge domain (SEQ ID NO: 291). In some embodiments, the iCAR comprises PD-1 (36) hinge domain (SEQ ID NO: 292). In some embodiments, the iCAR comprises PD-1 (30) hinge domain (SEQ ID NO: 293). In some embodiments, the iCAR comprises PD-1 (26) hinge domain (SEQ ID NO: 294). In some embodiments, the iCAR comprises PD-1 (20) hinge domain (SEQ ID NO: 295). In some embodiments, the iCAR comprises a CD8 alpha transmembrane domain (SEQ ID NO:95). In some embodiments, the iCAR comprises a CD28 transmembrane domain (SEQ ID NO:96). In some embodiments, the iCAR comprises a PD-1 transmembrane domain (SEQ ID NO:97). In some embodiments, the iCAR comprises a LIR1 transmembrane domain (SEQ ID NO:98). In some embodiments, the iCAR comprises a CD33 transmembrane domain (SEQ ID NO:99). In some embodiments, the iCAR comprises a KIR2DL1 transmembrane domain (SEQ ID NO:100). In some embodiments, the iCAR comprises a PD-1 inhibitory domain (SEQ ID NO:101). In some embodiments, the iCAR comprises a KIR2DL1 inhibitory domain (SEQ ID NO:102). In some embodiments, the iCAR comprises a KIR2DL2 inhibitory domain (SEQ ID NO:103). In some embodiments, the iCAR comprises a KIR2DL3 inhibitory domain (SEQ ID NO:104). In some embodiments, the iCAR comprises a KIR2DL4 inhibitory domain (SEQ ID NO:105). In some embodiments, the iCAR comprises a KIR2DL5A inhibitory domain (SEQ ID NO:106). In some embodiments, the iCAR comprises a KIR3DL1 inhibitory domain (SEQ ID NO:107). In some embodiments, the iCAR comprises a KIR3DL2 inhibitory domain (SEQ ID NO:108). In some embodiments, the iCAR comprises a KIR3DL3 inhibitory domain (SEQ ID NO:109). In some embodiments, the iCAR comprises a LAIR1 inhibitory domain (SEQ ID NO:110). In some embodiments, the iCAR comprises a CD22 inhibitory domain (SEQ ID NO:111). In some embodiments, the iCAR comprises a CD33 inhibitory domain (SEQ ID NO:112). In some embodiments, the iCAR comprises a SIGLEC5 inhibitory domain (SEQ ID NO: 113). In some embodiments, the iCAR comprises a SIGLEC6 inhibitory domain (SEQ ID NO:114). In some embodiments, the iCAR comprises a SIGLEC7 inhibitory domain (SEQ ID NO: 115). In some embodiments, the iCAR comprises a SIGLEC8 inhibitory domain (SEQ ID NO: 116). In some embodiments, the iCAR comprises a SIGLEC9 inhibitory domain (SEQ ID NO: 117). In some embodiments, the iCAR comprises a SIGLEC10 inhibitory domain (SEQ ID NO: 118). In some embodiments, the iCAR comprises a SIGLEC11 inhibitory domain (SEQ ID NO: 119). In some embodiments, the iCAR comprises a SIGLEC12 inhibitory domain (SEQ ID NO:120). In some embodiments, the iCAR comprises a PECAM1/CD31 inhibitory domain (SEQ ID NO:121). In some embodiments, the iCAR comprises a CD200R1 inhibitory domain (SEQ ID NO:122). In some embodiments, the iCAR comprises a FCRL1 inhibitory domain (SEQ ID NO:123). In some embodiments, the iCAR comprises a FCRL2 inhibitory domain (SEQ ID NO:124). In some embodiments, the iCAR comprises a FCRL3 inhibitory domain (SEQ ID NO:125). In some embodiments, the iCAR comprises a FCRL4 inhibitory domain (SEQ ID NO:126). In some embodiments, the iCAR comprises a FCRL5 inhibitory domain (SEQ ID NO:127). In some embodiments, the iCAR comprises a SLAMF1 inhibitory domain (SEQ ID NO:128). In some embodiments, the iCAR comprises a SLAMF5 inhibitory domain (SEQ ID NO:129). In some embodiments, the iCAR comprises a BTLA inhibitory domain (SEQ ID NO:130). In some embodiments, the iCAR comprises a LAG3 inhibitory domain (SEQ ID NO:131). In some embodiments, the iCAR comprises a 2B4 inhibitory domain (SEQ ID NO:132). In some embodiments, the iCAR comprises a CD160 inhibitory domain (SEQ ID NO:133). In some embodiments, the iCAR comprises a CEACAM1 inhibitory domain (SEQ ID NO:134). In some embodiments, the iCAR comprises a TIM3 inhibitory domain (SEQ ID NO:135). In some embodiments, the iCAR comprises a VISTA inhibitory domain (SEQ ID NO:136). In some embodiments, the iCAR comprises a TIGIT inhibitory domain (SEQ ID NO:137). In some embodiments, the iCAR comprises a SIRPalpha inhibitory domain (SEQ ID NO:138). In some embodiments, the iCAR comprises a FcγRIIB inhibitory domain (SEQ ID NO:139). In some embodiments, the iCAR comprises a CD5 inhibitory domain (SEQ ID NO:140). In some embodiments, the iCAR comprises a CD300a inhibitory domain (SEQ ID NO:141). In some embodiments, the iCAR comprises a CD300f inhibitory domain (SEQ ID NO:142). In some embodiments, the iCAR comprises a LIR1 inhibitory domain (SEQ ID NO:143). In some embodiments, the iCAR comprises a LIR2 inhibitory domain (SEQ ID NO:144). In some embodiments, the iCAR comprises a LIR3 inhibitory domain (SEQ ID NO:145). In some embodiments, the iCAR comprises a LIR5 inhibitory domain (SEQ ID NO:146). In some embodiments, the iCAR comprises a LIR8 inhibitory domain (SEQ ID NO:147). In some embodiments, the iCAR comprises a Ly9 inhibitory domain (SEQ ID NO:148). In some embodiments, the iCAR comprises a 2xPD1(G4S) inhibitory domain (SEQ ID NO:149). In some embodiments, the iCAR comprises a 2xPD1(PD1) inhibitory domain (SEQ ID NO:150). In some embodiments, the iCAR comprises a PVRIg inhibitory domain (SEQ ID NO:151). In some embodiments, the iCAR comprises an AA2AR inhibitory domain (SEQ ID NO:152). In some embodiments, the iCAR comprises a signal peptide upstream of the iCAR portion, wherein the signal peptide is a CD8 alpha signal peptide (SEQ ID NO: 161), a GM-CSF signal peptide (SEQ ID NO: 162), or a mIgK signal peptide (SEQ ID NO: 306).

[0350] In some embodiments, the scFv has the VL and VH sequences of MWB1.2 (SEQ ID NOs: 163 and 164). In some embodiments, the orientation of the iCAR VH and VL regions is VH-VL. In some embodiments, the orientation of the iCAR VH and VL regions is VL-VH. In some embodiments, the iCAR scFv comprises a (G4S)X3 linker (SEQ ID NO:81) linker that covalently connects the VH and the VL to form the iCAR scFv. In some embodiments, the iCAR scFv comprises a Whitlow linker (SEQ ID NO:82) linker that covalently connects the VH and the VL to form the iCAR scFv. In some embodiments, the iCAR comprises a CD8 alpha hinge domain (SEQ ID NO:84). In some embodiments, the iCAR comprises a CD28 hinge domain (SEQ ID NO:85). In some embodiments, the iCAR comprises a PD-1 hinge domain (SEQ ID NO:86). In some embodiments, the iCAR comprises a LIR1 Ig3-4 hinge domain (SEQ ID NO:87). In some embodiments, the iCAR comprises a LIR1 Ig-4 hinge domain (SEQ ID NO:88). In some embodiments, the iCAR comprises a LIR1 52 aa hinge domain (SEQ ID NO:89). In some embodiments, the iCAR comprises a LIR1 36 aa hinge domain (SEQ ID NO:90). In some embodiments, the iCAR comprises a LIR1 30 aa hinge domain (SEQ ID NO:91). In some embodiments, the iCAR comprises a LIR1 8 aa hinge domain (SEQ ID NO:92). In some embodiments, the iCAR comprises a CD33 hinge domain (SEQ ID NO:93). In some embodiments, the iCAR comprises a KIR2DL1 hinge domain (SEQ ID NO:94). In some embodiments, the iCAR comprises aLIR1 26 aa hinge domain (SEQ ID NO: 289). In some embodiments, the iCAR comprises PD-1 (47) hinge domain (SEQ ID NO: 290). In some embodiments, the iCAR comprises PD-1 (42) hinge domain (SEQ ID NO: 291). In some embodiments, the iCAR comprises PD-1 (36) hinge domain (SEQ ID NO: 292). In some embodiments, the iCAR comprises PD-1 (30) hinge domain (SEQ ID NO: 293). In some embodiments, the iCAR comprises PD-1 (26) hinge domain (SEQ ID NO: 294). In some embodiments, the iCAR comprises PD-1 (20) hinge domain (SEQ ID NO: 295). In some embodiments, the iCAR comprises a CD8 alpha transmembrane domain (SEQ ID NO:95). In some embodiments, the iCAR comprises a CD28 transmembrane domain (SEQ ID NO:96). In some embodiments, the iCAR comprises a PD-1 transmembrane domain (SEQ ID NO:97). In some embodiments, the iCAR comprises a LIR1 transmembrane domain (SEQ ID NO:98). In some embodiments, the iCAR comprises a CD33 transmembrane domain (SEQ ID NO:99). In some embodiments, the iCAR comprises a KIR2DL1 transmembrane domain (SEQ ID NO:100). In some embodiments, the iCAR comprises a PD-1 inhibitory domain (SEQ ID NO:101). In some embodiments, the iCAR comprises a KIR2DL1 inhibitory domain (SEQ ID NO:102). In some embodiments, the iCAR comprises a KIR2DL2 inhibitory domain (SEQ ID NO:103). In some embodiments, the iCAR comprises a KIR2DL3 inhibitory domain (SEQ ID NO:104). In some embodiments, the iCAR comprises a KIR2DL4 inhibitory domain (SEQ ID NO:105). In some embodiments, the iCAR comprises a KIR2DL5A inhibitory domain (SEQ ID NO:106). In some embodiments, the iCAR comprises a KIR3DL1 inhibitory domain (SEQ ID NO:107). In some embodiments, the iCAR comprises a KIR3DL2 inhibitory domain (SEQ ID NO:108). In some embodiments, the iCAR comprises a KIR3DL3 inhibitory domain (SEQ ID NO:109). In some embodiments, the iCAR comprises a LAIR1 inhibitory domain (SEQ ID NO:110). In some embodiments, the iCAR comprises a CD22 inhibitory domain (SEQ ID NO:111). In some embodiments, the iCAR comprises a CD33 inhibitory domain (SEQ ID NO:112). In some embodiments, the iCAR comprises a SIGLEC5 inhibitory domain (SEQ ID NO: 113). In some embodiments, the iCAR comprises a SIGLEC6 inhibitory domain (SEQ ID NO:114). In some embodiments, the iCAR comprises a SIGLEC7 inhibitory domain (SEQ ID NO: 115). In some embodiments, the iCAR comprises a SIGLEC8 inhibitory domain (SEQ ID NO: 116). In some embodiments, the iCAR comprises a SIGLEC9 inhibitory domain (SEQ ID NO: 117). In some embodiments, the iCAR comprises a SIGLEC10 inhibitory domain (SEQ ID NO: 118). In some embodiments, the iCAR comprises a SIGLEC11 inhibitory domain (SEQ ID NO: 119). In some embodiments, the iCAR comprises a SIGLEC12 inhibitory domain (SEQ ID NO:120). In some embodiments, the iCAR comprises a PECAM1/CD31 inhibitory domain (SEQ ID NO:121). In some embodiments, the iCAR comprises a CD200R1 inhibitory domain (SEQ ID NO:122). In some embodiments, the iCAR comprises a FCRL1 inhibitory domain (SEQ ID NO:123). In some embodiments, the iCAR comprises a FCRL2 inhibitory domain (SEQ ID NO:124). In some embodiments, the iCAR comprises a FCRL3 inhibitory domain (SEQ ID NO:125). In some embodiments, the iCAR comprises a FCRL4 inhibitory domain (SEQ ID NO:126). In some embodiments, the iCAR comprises a FCRL5 inhibitory domain (SEQ ID NO:127). In some embodiments, the iCAR comprises a SLAMF1 inhibitory domain (SEQ ID NO:128). In some embodiments, the iCAR comprises a SLAMF5 inhibitory domain (SEQ ID NO:129). In some embodiments, the iCAR comprises a BTLA inhibitory domain (SEQ ID NO:130). In some embodiments, the iCAR comprises a LAG3 inhibitory domain (SEQ ID NO:131). In some embodiments, the iCAR comprises a 2B4 inhibitory domain (SEQ ID NO:132). In some embodiments, the iCAR comprises a CD160 inhibitory domain (SEQ ID NO:133). In some embodiments, the iCAR comprises a CEACAM1 inhibitory domain (SEQ ID NO:134). In some embodiments, the iCAR comprises a TIM3 inhibitory domain (SEQ ID NO:135). In some embodiments, the iCAR comprises a VISTA inhibitory domain (SEQ ID NO:136). In some embodiments, the iCAR comprises a TIGIT inhibitory domain (SEQ ID NO:137). In some embodiments, the iCAR comprises a SIRPalpha inhibitory domain (SEQ ID NO:138). In some embodiments, the iCAR comprises a FcγRIIB inhibitory domain (SEQ ID NO: 139). In some embodiments, the iCAR comprises a CD5 inhibitory domain (SEQ ID NO:140). In some embodiments, the iCAR comprises a CD300a inhibitory domain (SEQ ID NO:141). In some embodiments, the iCAR comprises a CD300f inhibitory domain (SEQ ID NO:142). In some embodiments, the iCAR comprises a LIR1 inhibitory domain (SEQ ID NO:143). In some embodiments, the iCAR comprises a LIR2 inhibitory domain (SEQ ID NO:144). In some embodiments, the iCAR comprises a LIR3 inhibitory domain (SEQ ID NO:145). In some embodiments, the iCAR comprises a LIR5 inhibitory domain (SEQ ID NO:146). In some embodiments, the iCAR comprises a LIR8 inhibitory domain (SEQ ID NO:147). In some embodiments, the iCAR comprises a Ly9 inhibitory domain (SEQ ID NO:148). In some embodiments, the iCAR comprises a 2xPD1(G4S) inhibitory domain (SEQ ID NO:149). In some embodiments, the iCAR comprises a 2xPD1(PD1) inhibitory domain (SEQ ID NO:150). In some embodiments, the iCAR comprises a PVRIg inhibitory domain (SEQ ID NO:151). In some embodiments, the iCAR comprises an AA2AR inhibitory domain (SEQ ID NO:152). In some embodiments, the iCAR comprises a signal peptide upstream of the iCAR portion, wherein the signal peptide is a CD8 alpha signal peptide (SEQ ID NO: 161), a GM-CSF signal peptide (SEQ ID NO: 162), or a mIgK signal peptide (SEQ ID NO: 306).

[0351] In some embodiments, the scFv has the VL and VH sequences of SN66E3.2 (SEQ ID NOs: 165 and 166). In some embodiments, the orientation of the iCAR VH and VL regions is VH-VL. In some embodiments, the orientation of the iCAR VH and VL regions is VL-VH. In some embodiments, the iCAR scFv comprises a (G4S)X3 linker (SEQ ID NO:81) linker that covalently connects the VH and the VL to form the iCAR scFv. In some embodiments, the iCAR scFv comprises a Whitlow linker (SEQ ID NO:82) linker that covalently connects the VH and the VL to form the iCAR scFv. In some embodiments, the iCAR comprises a CD8 alpha hinge domain (SEQ ID NO:84). In some embodiments, the iCAR comprises a CD28 hinge domain (SEQ ID NO:85). In some embodiments, the iCAR comprises a PD-1 hinge domain (SEQ ID NO:86). In some embodiments, the iCAR comprises a LIR1 Ig3-4 hinge domain (SEQ ID NO:87). In some embodiments, the iCAR comprises a LIR1 Ig-4 hinge domain (SEQ ID NO:88). In some embodiments, the iCAR comprises a LIR1 52 aa hinge domain (SEQ ID NO:89). In some embodiments, the iCAR comprises a LIR1 36 aa hinge domain (SEQ ID NO:90). In some embodiments, the iCAR comprises a LIR1 30 aa hinge domain (SEQ ID NO:91). In some embodiments, the iCAR comprises a LIR1 8 aa hinge domain (SEQ ID NO:92). In some embodiments, the iCAR comprises a CD33 hinge domain (SEQ ID NO:93). In some embodiments, the iCAR comprises a KIR2DL1 hinge domain (SEQ ID NO:94). In some embodiments, the iCAR comprises aLIR1 26 aa hinge domain (SEQ ID NO: 289). In some embodiments, the iCAR comprises PD-1 (47) hinge domain (SEQ ID NO: 290). In some embodiments, the iCAR comprises PD-1 (42) hinge domain (SEQ ID NO: 291). In some embodiments, the iCAR comprises PD-1 (36) hinge domain (SEQ ID NO: 292). In some embodiments, the iCAR comprises PD-1 (30) hinge domain (SEQ ID NO: 293). In some embodiments, the iCAR comprises PD-1 (26) hinge domain (SEQ ID NO: 294). In some embodiments, the iCAR comprises PD-1 (20) hinge domain (SEQ ID NO: 295). In some embodiments, the iCAR comprises a CD8 alpha transmembrane domain (SEQ ID NO:95). In some embodiments, the iCAR comprises a CD28 transmembrane domain (SEQ ID NO:96). In some embodiments, the iCAR comprises a PD-1 transmembrane domain (SEQ ID NO:97). In some embodiments, the iCAR comprises a LIR1 transmembrane domain (SEQ ID NO:98). In some embodiments, the iCAR comprises a CD33 transmembrane domain (SEQ ID NO:99). In some embodiments, the iCAR comprises a KIR2DL1 transmembrane domain (SEQ ID NO:100). In some embodiments, the iCAR comprises a PD-1 inhibitory domain (SEQ ID NO:101). In some embodiments, the iCAR comprises a KIR2DL1 inhibitory domain (SEQ ID NO:102). In some embodiments, the iCAR comprises a KIR2DL2 inhibitory domain (SEQ ID NO:103). In some embodiments, the iCAR comprises a KIR2DL3 inhibitory domain (SEQ ID NO:104). In some embodiments, the iCAR comprises a KIR2DL4 inhibitory domain (SEQ ID NO:105). In some embodiments, the iCAR comprises a KIR2DL5A inhibitory domain (SEQ ID NO:106). In some embodiments, the iCAR comprises a KIR3DL1 inhibitory domain (SEQ ID NO:107). In some embodiments, the iCAR comprises a KIR3DL2 inhibitory domain (SEQ ID NO:108). In some embodiments, the iCAR comprises a KIR3DL3 inhibitory domain (SEQ ID NO:109). In some embodiments, the iCAR comprises a LAIR1 inhibitory domain (SEQ ID NO:110). In some embodiments, the iCAR comprises a CD22 inhibitory domain (SEQ ID NO:111). In some embodiments, the iCAR comprises a CD33 inhibitory domain (SEQ ID NO:112). In some embodiments, the iCAR comprises a SIGLEC5 inhibitory domain (SEQ ID NO: 113). In some embodiments, the iCAR comprises a SIGLEC6 inhibitory domain (SEQ ID NO:114). In some embodiments, the iCAR comprises a SIGLEC7 inhibitory domain (SEQ ID NO: 115). In some embodiments, the iCAR comprises a SIGLEC8 inhibitory domain (SEQ ID NO: 116). In some embodiments, the iCAR comprises a SIGLEC9 inhibitory domain (SEQ ID NO: 117). In some embodiments, the iCAR comprises a SIGLEC10 inhibitory domain (SEQ ID NO: 118). In some embodiments, the iCAR comprises a SIGLEC11 inhibitory domain (SEQ ID NO: 119). In some embodiments, the iCAR comprises a SIGLEC12 inhibitory domain (SEQ ID NO:120). In some embodiments, the iCAR comprises a PECAM1/CD31 inhibitory domain (SEQ ID NO:121). In some embodiments, the iCAR comprises a CD200R1 inhibitory domain (SEQ ID NO:122). In some embodiments, the iCAR comprises a FCRL1 inhibitory domain (SEQ ID NO:123). In some embodiments, the iCAR comprises a FCRL2 inhibitory domain (SEQ ID NO:124). In some embodiments, the iCAR comprises a FCRL3 inhibitory domain (SEQ ID NO:125). In some embodiments, the iCAR comprises a FCRL4 inhibitory domain (SEQ ID NO:126). In some embodiments, the iCAR comprises a FCRL5 inhibitory domain (SEQ ID NO:127). In some embodiments, the iCAR comprises a SLAMF1 inhibitory domain (SEQ ID NO:128). In some embodiments, the iCAR comprises a SLAMF5 inhibitory domain (SEQ ID NO:129). In some embodiments, the iCAR comprises a BTLA inhibitory domain (SEQ ID NO:130). In some embodiments, the iCAR comprises a LAG3 inhibitory domain (SEQ ID NO:131). In some embodiments, the iCAR comprises a 2B4 inhibitory domain (SEQ ID NO:132). In some embodiments, the iCAR comprises a CD160 inhibitory domain (SEQ ID NO:133). In some embodiments, the iCAR comprises a CEACAM1 inhibitory domain (SEQ ID NO:134). In some embodiments, the iCAR comprises a TIM3 inhibitory domain (SEQ ID NO:135). In some embodiments, the iCAR comprises a VISTA inhibitory domain (SEQ ID NO:136). In some embodiments, the iCAR comprises a TIGIT inhibitory domain (SEQ ID NO:137). In some embodiments, the iCAR comprises a SIRPalpha inhibitory domain (SEQ ID NO:138). In some embodiments, the iCAR comprises a FcγRIIB inhibitory domain (SEQ ID NO:139). In some embodiments, the iCAR comprises a CD5 inhibitory domain (SEQ ID NO:140). In some embodiments, the iCAR comprises a CD300a inhibitory domain (SEQ ID NO:141). In some embodiments, the iCAR comprises a CD300f inhibitory domain (SEQ ID NO:142). In some embodiments, the iCAR comprises a LIR1 inhibitory domain (SEQ ID NO:143). In some embodiments, the iCAR comprises a LIR2 inhibitory domain (SEQ ID NO:144). In some embodiments, the iCAR comprises a LIR3 inhibitory domain (SEQ ID NO:145). In some embodiments, the iCAR comprises a LIR5 inhibitory domain (SEQ ID NO:146). In some embodiments, the iCAR comprises a LIR8 inhibitory domain (SEQ ID NO:147). In some embodiments, the iCAR comprises a Ly9 inhibitory domain (SEQ ID NO:148). In some embodiments, the iCAR comprises a 2xPD1(G4S) inhibitory domain (SEQ ID NO:149). In some embodiments, the iCAR comprises a 2xPD1(PD1) inhibitory domain (SEQ ID NO:150). In some embodiments, the iCAR comprises a PVRIg inhibitory domain (SEQ ID NO:151). In some embodiments, the iCAR comprises an AA2AR inhibitory domain (SEQ ID NO:152). In some embodiments, the iCAR comprises a signal peptide upstream of the iCAR portion, wherein the signal peptide is a CD8 alpha signal peptide (SEQ ID NO: 161), a GM-CSF signal peptide (SEQ ID NO: 162), or a mIgK signal peptide (SEQ ID NO: 306).

[0352] In some embodiments, the scFv has the VL and VH sequences of MWB1.1 (SEQ ID NOs: 273). In some embodiments, the orientation of the iCAR VH and VL regions is VH-VL. In some embodiments, the orientation of the iCAR VH and VL regions is VL-VH. In some embodiments, the iCAR scFv comprises a (G4S)X3 linker (SEQ ID NO:81) linker that covalently connects the VH and the VL to form the iCAR scFv. In some embodiments, the iCAR scFv comprises a Whitlow linker (SEQ ID NO:82) linker that covalently connects the VH and the VL to form the iCAR scFv. In some embodiments, the iCAR comprises a CD8 alpha hinge domain (SEQ ID NO:84). In some embodiments, the iCAR comprises a CD28 hinge domain (SEQ ID NO:85). In some embodiments, the iCAR comprises a PD-1 hinge domain (SEQ ID NO:86). In some embodiments, the iCAR comprises a LIR1 Ig3-4 hinge domain (SEQ ID NO:87). In some embodiments, the iCAR comprises a LIR1 Ig-4 hinge domain (SEQ ID NO:88). In some embodiments, the iCAR comprises a LIR1 52 aa hinge domain (SEQ ID NO:89). In some embodiments, the iCAR comprises a LIR1 36 aa hinge domain (SEQ ID NO:90). In some embodiments, the iCAR comprises a LIR1 30 aa hinge domain (SEQ ID NO:91). In some embodiments, the iCAR comprises a LIR1 8 aa hinge domain (SEQ ID NO:92). In some embodiments, the iCAR comprises a CD33 hinge domain (SEQ ID NO:93). In some embodiments, the iCAR comprises a KIR2DL1 hinge domain (SEQ ID NO:94). In some embodiments, the iCAR comprises aLIR1 26 aa hinge domain (SEQ ID NO: 289). In some embodiments, the iCAR comprises PD-1 (47) hinge domain (SEQ ID NO: 290). In some embodiments, the iCAR comprises PD-1 (42) hinge domain (SEQ ID NO: 291). In some embodiments, the iCAR comprises PD-1 (36) hinge domain (SEQ ID NO: 292). In some embodiments, the iCAR comprises PD-1 (30) hinge domain (SEQ ID NO: 293). In some embodiments, the iCAR comprises PD-1 (26) hinge domain (SEQ ID NO: 294). In some embodiments, the iCAR comprises PD-1 (20) hinge domain (SEQ ID NO: 295). In some embodiments, the iCAR comprises a CD8 alpha transmembrane domain (SEQ ID NO:95). In some embodiments, the iCAR comprises a CD28 transmembrane domain (SEQ ID NO:96). In some embodiments, the iCAR comprises a PD-1 transmembrane domain (SEQ ID NO:97). In some embodiments, the iCAR comprises a LIR1 transmembrane domain (SEQ ID NO:98). In some embodiments, the iCAR comprises a CD33 transmembrane domain (SEQ ID NO:99). In some embodiments, the iCAR comprises a KIR2DL1 transmembrane domain (SEQ ID NO:100). In some embodiments, the iCAR comprises a PD-1 inhibitory domain (SEQ ID NO:101). In some embodiments, the iCAR comprises a KIR2DL1 inhibitory domain (SEQ ID NO:102). In some embodiments, the iCAR comprises a KIR2DL2 inhibitory domain (SEQ ID NO:103). In some embodiments, the iCAR comprises a KIR2DL3 inhibitory domain (SEQ ID NO:104). In some embodiments, the iCAR comprises a KIR2DL4 inhibitory domain (SEQ ID NO:105). In some embodiments, the iCAR comprises a KIR2DL5A inhibitory domain (SEQ ID NO:106). In some embodiments, the iCAR comprises a KIR3DL1 inhibitory domain (SEQ ID NO:107). In some embodiments, the iCAR comprises a KIR3DL2 inhibitory domain (SEQ ID NO:108). In some embodiments, the iCAR comprises a KIR3DL3 inhibitory domain (SEQ ID NO:109). In some embodiments, the iCAR comprises a LAIR1 inhibitory domain (SEQ ID NO:110). In some embodiments, the iCAR comprises a CD22 inhibitory domain (SEQ ID NO:111). In some embodiments, the iCAR comprises a CD33 inhibitory domain (SEQ ID NO:112). In some embodiments, the iCAR comprises a SIGLEC5 inhibitory domain (SEQ ID NO: 113). In some embodiments, the iCAR comprises a SIGLEC6 inhibitory domain (SEQ ID NO:114). In some embodiments, the iCAR comprises a SIGLEC7 inhibitory domain (SEQ ID NO: 115). In some embodiments, the iCAR comprises a SIGLEC8 inhibitory domain (SEQ ID NO:116). In some embodiments, the iCAR comprises a SIGLEC9 inhibitory domain (SEQ ID NO: 117). In some embodiments, the iCAR comprises a SIGLEC10 inhibitory domain (SEQ ID NO: 118). In some embodiments, the iCAR comprises a SIGLEC11 inhibitory domain (SEQ ID NO:119). In some embodiments, the iCAR comprises a SIGLEC12 inhibitory domain (SEQ ID NO:120). In some embodiments, the iCAR comprises a PECAM1/CD31 inhibitory domain (SEQ ID NO:121). In some embodiments, the iCAR comprises a CD200R1 inhibitory domain (SEQ ID NO:122). In some embodiments, the iCAR comprises a FCRL1 inhibitory domain (SEQ ID NO:123). In some embodiments, the iCAR comprises a FCRL2 inhibitory domain (SEQ ID NO:124). In some embodiments, the iCAR comprises a FCRL3 inhibitory domain (SEQ ID NO:125). In some embodiments, the iCAR comprises a FCRL4 inhibitory domain (SEQ ID NO:126). In some embodiments, the iCAR comprises a FCRL5 inhibitory domain (SEQ ID NO:127). In some embodiments, the iCAR comprises a SLAMF1 inhibitory domain (SEQ ID NO:128). In some embodiments, the iCAR comprises a SLAMF5 inhibitory domain (SEQ ID NO:129). In some embodiments, the iCAR comprises a BTLA inhibitory domain (SEQ ID NO:130). In some embodiments, the iCAR comprises a LAG3 inhibitory domain (SEQ ID NO:131). In some embodiments, the iCAR comprises a 2B4 inhibitory domain (SEQ ID NO:132). In some embodiments, the iCAR comprises a CD160 inhibitory domain (SEQ ID NO:133). In some embodiments, the iCAR comprises a CEACAM1 inhibitory domain (SEQ ID NO:134). In some embodiments, the iCAR comprises a TIM3 inhibitory domain (SEQ ID NO:135). In some embodiments, the iCAR comprises a VISTA inhibitory domain (SEQ ID NO:136). In some embodiments, the iCAR comprises a TIGIT inhibitory domain (SEQ ID NO:137). In some embodiments, the iCAR comprises a SIRPalpha inhibitory domain (SEQ ID NO:138). In some embodiments, the iCAR comprises a FcγRIIB inhibitory domain (SEQ ID NO:139). In some embodiments, the iCAR comprises a CD5 inhibitory domain (SEQ ID NO:140). In some embodiments, the iCAR comprises a CD300a inhibitory domain (SEQ ID NO:141). In some embodiments, the iCAR comprises a CD300f inhibitory domain (SEQ ID NO:142). In some embodiments, the iCAR comprises a LIR1 inhibitory domain (SEQ ID NO:143). In some embodiments, the iCAR comprises a LIR2 inhibitory domain (SEQ ID NO:144). In some embodiments, the iCAR comprises a LIR3 inhibitory domain (SEQ ID NO:145). In some embodiments, the iCAR comprises a LIR5 inhibitory domain (SEQ ID NO:146). In some embodiments, the iCAR comprises a LIR8 inhibitory domain (SEQ ID NO:147). In some embodiments, the iCAR comprises a Ly9 inhibitory domain (SEQ ID NO:148). In some embodiments, the iCAR comprises a 2xPD1(G4S) inhibitory domain (SEQ ID NO:149). In some embodiments, the iCAR comprises a 2xPD1(PD1) inhibitory domain (SEQ ID NO:150). In some embodiments, the iCAR comprises a PVRIg inhibitory domain (SEQ ID NO:151). In some embodiments, the iCAR comprises an AA2AR inhibitory domain (SEQ ID NO:152). In some embodiments, the iCAR comprises a signal peptide upstream of the iCAR portion, wherein the signal peptide is a CD8 alpha signal peptide (SEQ ID NO: 161), a GM-CSF signal peptide (SEQ ID NO: 162), or a mIgK signal peptide (SEQ ID NO: 306).

[0353] In some embodiments, the scFv has the VL and VH sequences of MWB1.2 (SEQ ID NOs: 274). In some embodiments, the orientation of the iCAR VH and VL regions is VH-VL. In some embodiments, the orientation of the iCAR VH and VL regions is VL-VH. In some embodiments, the iCAR scFv comprises a (G4S)X3 linker (SEQ ID NO:81) linker that covalently connects the VH and the VL to form the iCAR scFv. In some embodiments, the iCAR scFv comprises a Whitlow linker (SEQ ID NO:82) linker that covalently connects the VH and the VL to form the iCAR scFv. In some embodiments, the iCAR comprises a CD8 alpha hinge domain (SEQ ID NO:84). In some embodiments, the iCAR comprises a CD28 hinge domain (SEQ ID NO:85). In some embodiments, the iCAR comprises a PD-1 hinge domain (SEQ ID NO:86). In some embodiments, the iCAR comprises a LIR1 Ig3-4 hinge domain (SEQ ID NO:87). In some embodiments, the iCAR comprises a LIR1 Ig-4 hinge domain (SEQ ID NO:88). In some embodiments, the iCAR comprises a LIR1 52 aa hinge domain (SEQ ID NO:89). In some embodiments, the iCAR comprises a LIR1 36 aa hinge domain (SEQ ID NO:90). In some embodiments, the iCAR comprises a LIR1 30 aa hinge domain (SEQ ID NO:91). In some embodiments, the iCAR comprises a LIR1 8 aa hinge domain (SEQ ID NO:92). In some embodiments, the iCAR comprises a CD33 hinge domain (SEQ ID NO:93). In some embodiments, the iCAR comprises a KIR2DL1 hinge domain (SEQ ID NO:94). In some embodiments, the iCAR comprises aLIR1 26 aa hinge domain (SEQ ID NO: 289). In some embodiments, the iCAR comprises PD-1 (47) hinge domain (SEQ ID NO: 290). In some embodiments, the iCAR comprises PD-1 (42) hinge domain (SEQ ID NO: 291). In some embodiments, the iCAR comprises PD-1 (36) hinge domain (SEQ ID NO: 292). In some embodiments, the iCAR comprises PD-1 (30) hinge domain (SEQ ID NO: 293). In some embodiments, the iCAR comprises PD-1 (26) hinge domain (SEQ ID NO: 294). In some embodiments, the iCAR comprises PD-1 (20) hinge domain (SEQ ID NO: 295). In some embodiments, the iCAR comprises a CD8 alpha transmembrane domain (SEQ ID NO:95). In some embodiments, the iCAR comprises a CD28 transmembrane domain (SEQ ID NO:96). In some embodiments, the iCAR comprises a PD-1 transmembrane domain (SEQ ID NO:97). In some embodiments, the iCAR comprises a LIR1 transmembrane domain (SEQ ID NO:98). In some embodiments, the iCAR comprises a CD33 transmembrane domain (SEQ ID NO:99). In some embodiments, the iCAR comprises a KIR2DL1 transmembrane domain (SEQ ID NO:100). In some embodiments, the iCAR comprises a PD-1 inhibitory domain (SEQ ID NO:101). In some embodiments, the iCAR comprises a KIR2DL1 inhibitory domain (SEQ ID NO:102). In some embodiments, the iCAR comprises a KIR2DL2 inhibitory domain (SEQ ID NO:103). In some embodiments, the iCAR comprises a KIR2DL3 inhibitory domain (SEQ ID NO:104). In some embodiments, the iCAR comprises a KIR2DL4 inhibitory domain (SEQ ID NO:105). In some embodiments, the iCAR comprises a KIR2DL5A inhibitory domain (SEQ ID NO:106). In some embodiments, the iCAR comprises a KIR3DL1 inhibitory domain (SEQ ID NO:107). In some embodiments, the iCAR comprises a KIR3DL2 inhibitory domain (SEQ ID NO:108). In some embodiments, the iCAR comprises a KIR3DL3 inhibitory domain (SEQ ID NO:109). In some embodiments, the iCAR comprises a LAIR1 inhibitory domain (SEQ ID NO:110). In some embodiments, the iCAR comprises a CD22 inhibitory domain (SEQ ID NO:111). In some embodiments, the iCAR comprises a CD33 inhibitory domain (SEQ ID NO:112). In some embodiments, the iCAR comprises a SIGLEC5 inhibitory domain (SEQ ID NO: 113). In some embodiments, the iCAR comprises a SIGLEC6 inhibitory domain (SEQ ID NO:114). In some embodiments, the iCAR comprises a SIGLEC7 inhibitory domain (SEQ ID NO: 115). In some embodiments, the iCAR comprises a SIGLEC8 inhibitory domain (SEQ ID NO: 116). In some embodiments, the iCAR comprises a SIGLEC9 inhibitory domain (SEQ ID NO:117). In some embodiments, the iCAR comprises a SIGLEC10 inhibitory domain (SEQ ID NO: 118). In some embodiments, the iCAR comprises a SIGLEC11 inhibitory domain (SEQ ID NO: 119). In some embodiments, the iCAR comprises a SIGLEC12 inhibitory domain (SEQ ID NO:120). In some embodiments, the iCAR comprises a PECAM1/CD31 inhibitory domain (SEQ ID NO:121). In some embodiments, the iCAR comprises a CD200R1 inhibitory domain (SEQ ID NO:122). In some embodiments, the iCAR comprises a FCRL1 inhibitory domain (SEQ ID NO:123). In some embodiments, the iCAR comprises a FCRL2 inhibitory domain (SEQ ID NO:124). In some embodiments, the iCAR comprises a FCRL3 inhibitory domain (SEQ ID NO:125). In some embodiments, the iCAR comprises a FCRL4 inhibitory domain (SEQ ID NO:126). In some embodiments, the iCAR comprises a FCRL5 inhibitory domain (SEQ ID NO:127). In some embodiments, the iCAR comprises a SLAMF1 inhibitory domain (SEQ ID NO:128). In some embodiments, the iCAR comprises a SLAMF5 inhibitory domain (SEQ ID NO:129). In some embodiments, the iCAR comprises a BTLA inhibitory domain (SEQ ID NO:130). In some embodiments, the iCAR comprises a LAG3 inhibitory domain (SEQ ID NO:131). In some embodiments, the iCAR comprises a 2B4 inhibitory domain (SEQ ID NO:132). In some embodiments, the iCAR comprises a CD160 inhibitory domain (SEQ ID NO:133). In some embodiments, the iCAR comprises a CEACAM1 inhibitory domain (SEQ ID NO:134). In some embodiments, the iCAR comprises a TIM3 inhibitory domain (SEQ ID NO:135). In some embodiments, the iCAR comprises a VISTA inhibitory domain (SEQ ID NO:136). In some embodiments, the iCAR comprises a TIGIT inhibitory domain (SEQ ID NO:137). In some embodiments, the iCAR comprises a SIRPalpha inhibitory domain (SEQ ID NO:138). In some embodiments, the iCAR comprises a FcγRIIB inhibitory domain (SEQ ID NO:139). In some embodiments, the iCAR comprises a CD5 inhibitory domain (SEQ ID NO:140). In some embodiments, the iCAR comprises a CD300a inhibitory domain (SEQ ID NO:141). In some embodiments, the iCAR comprises a CD300f inhibitory domain (SEQ ID NO:142). In some embodiments, the iCAR comprises a LIR1 inhibitory domain (SEQ ID NO:143). In some embodiments, the iCAR comprises a LIR2 inhibitory domain (SEQ ID NO:144). In some embodiments, the iCAR comprises a LIR3 inhibitory domain (SEQ ID NO:145). In some embodiments, the iCAR comprises a LIR5 inhibitory domain (SEQ ID NO:146). In some embodiments, the iCAR comprises a LIR8 inhibitory domain (SEQ ID NO:147). In some embodiments, the iCAR comprises a Ly9 inhibitory domain (SEQ ID NO:148). In some embodiments, the iCAR comprises a 2xPD1(G4S) inhibitory domain (SEQ ID NO:149). In some embodiments, the iCAR comprises a 2xPD1(PD1) inhibitory domain (SEQ ID NO:150). In some embodiments, the iCAR comprises a PVRIg inhibitory domain (SEQ ID NO:151). In some embodiments, the iCAR comprises an AA2AR inhibitory domain (SEQ ID NO:152). In some embodiments, the iCAR comprises a signal peptide upstream of the iCAR portion, wherein the signal peptide is a CD8 alpha signal peptide (SEQ ID NO: 161), a GM-CSF signal peptide (SEQ ID NO: 162), or a mIgK signal peptide (SEQ ID NO: 306).

[0354] In some embodiments, the scFv has the VL and VH sequences of SN66E3.3 (SEQ ID NOs: 283 and 284). In some embodiments, the orientation of the iCAR VH and VL regions is VH-VL. In some embodiments, the orientation of the iCAR VH and VL regions is VL-VH. In some embodiments, the iCAR scFv comprises a (G4S)X3 linker (SEQ ID NO:81) linker that covalently connects the VH and the VL to form the iCAR scFv. In some embodiments, the iCAR scFv comprises a Whitlow linker (SEQ ID NO:82) linker that covalently connects the VH and the VL to form the iCAR scFv. In some embodiments, the iCAR comprises a CD8 alpha hinge domain (SEQ ID NO:84). In some embodiments, the iCAR comprises a CD28 hinge domain (SEQ ID NO:85). In some embodiments, the iCAR comprises a PD-1 hinge domain (SEQ ID NO:86). In some embodiments, the iCAR comprises a LIR1 Ig3-4 hinge domain (SEQ ID NO:87). In some embodiments, the iCAR comprises a LIR1 Ig-4 hinge domain (SEQ ID NO:88). In some embodiments, the iCAR comprises a LIR1 52 aa hinge domain (SEQ ID NO:89). In some embodiments, the iCAR comprises a LIR1 36 aa hinge domain (SEQ ID NO:90). In some embodiments, the iCAR comprises a LIR1 30 aa hinge domain (SEQ ID NO:91). In some embodiments, the iCAR comprises a LIR1 8 aa hinge domain (SEQ ID NO:92). In some embodiments, the iCAR comprises a CD33 hinge domain (SEQ ID NO:93). In some embodiments, the iCAR comprises a KIR2DL1 hinge domain (SEQ ID NO:94). In some embodiments, the iCAR comprises aLIR1 26 aa hinge domain (SEQ ID NO: 289). In some embodiments, the iCAR comprises PD-1 (47) hinge domain (SEQ ID NO: 290). In some embodiments, the iCAR comprises PD-1 (42) hinge domain (SEQ ID NO: 291). In some embodiments, the iCAR comprises PD-1 (36) hinge domain (SEQ ID NO: 292). In some embodiments, the iCAR comprises PD-1 (30) hinge domain (SEQ ID NO: 293). In some embodiments, the iCAR comprises PD-1 (26) hinge domain (SEQ ID NO: 294). In some embodiments, the iCAR comprises PD-1 (20) hinge domain (SEQ ID NO: 295). In some embodiments, the iCAR comprises a CD8 alpha transmembrane domain (SEQ ID NO:95). In some embodiments, the iCAR comprises a CD28 transmembrane domain (SEQ ID NO:96). In some embodiments, the iCAR comprises a PD-1 transmembrane domain (SEQ ID NO:97). In some embodiments, the iCAR comprises a LIR1 transmembrane domain (SEQ ID NO:98). In some embodiments, the iCAR comprises a CD33 transmembrane domain (SEQ ID NO:99). In some embodiments, the iCAR comprises a KIR2DL1 transmembrane domain (SEQ ID NO:100). In some embodiments, the iCAR comprises a PD-1 inhibitory domain (SEQ ID NO:101). In some embodiments, the iCAR comprises a KIR2DL1 inhibitory domain (SEQ ID NO:102). In some embodiments, the iCAR comprises a KIR2DL2 inhibitory domain (SEQ ID NO:103). In some embodiments, the iCAR comprises a KIR2DL3 inhibitory domain (SEQ ID NO:104). In some embodiments, the iCAR comprises a KIR2DL4 inhibitory domain (SEQ ID NO:105). In some embodiments, the iCAR comprises a KIR2DL5A inhibitory domain (SEQ ID NO:106). In some embodiments, the iCAR comprises a KIR3DL1 inhibitory domain (SEQ ID NO:107). In some embodiments, the iCAR comprises a KIR3DL2 inhibitory domain (SEQ ID NO:108). In some embodiments, the iCAR comprises a KIR3DL3 inhibitory domain (SEQ ID NO:109). In some embodiments, the iCAR comprises a LAIR1 inhibitory domain (SEQ ID NO:110). In some embodiments, the iCAR comprises a CD22 inhibitory domain (SEQ ID NO:111). In some embodiments, the iCAR comprises a CD33 inhibitory domain (SEQ ID NO:112). In some embodiments, the iCAR comprises a SIGLEC5 inhibitory domain (SEQ ID NO: 113). In some embodiments, the iCAR comprises a SIGLEC6 inhibitory domain (SEQ ID NO:114). In some embodiments, the iCAR comprises a SIGLEC7 inhibitory domain (SEQ ID NO: 115). In some embodiments, the iCAR comprises a SIGLEC8 inhibitory domain (SEQ ID NO: 116). In some embodiments, the iCAR comprises a SIGLEC9 inhibitory domain (SEQ ID NO:117). In some embodiments, the iCAR comprises a SIGLEC10 inhibitory domain (SEQ ID NO: 118). In some embodiments, the iCAR comprises a SIGLEC11 inhibitory domain (SEQ ID NO: 119). In some embodiments, the iCAR comprises a SIGLEC12 inhibitory domain (SEQ ID NO:120). In some embodiments, the iCAR comprises a PECAM1/CD31 inhibitory domain (SEQ ID NO:121). In some embodiments, the iCAR comprises a CD200R1 inhibitory domain (SEQ ID NO:122). In some embodiments, the iCAR comprises a FCRL1 inhibitory domain (SEQ ID NO:123). In some embodiments, the iCAR comprises a FCRL2 inhibitory domain (SEQ ID NO:124). In some embodiments, the iCAR comprises a FCRL3 inhibitory domain (SEQ ID NO:125). In some embodiments, the iCAR comprises a FCRL4 inhibitory domain (SEQ ID NO:126). In some embodiments, the iCAR comprises a FCRL5 inhibitory domain (SEQ ID NO:127). In some embodiments, the iCAR comprises a SLAMF1 inhibitory domain (SEQ ID NO:128). In some embodiments, the iCAR comprises a SLAMF5 inhibitory domain (SEQ ID NO:129). In some embodiments, the iCAR comprises a BTLA inhibitory domain (SEQ ID NO:130). In some embodiments, the iCAR comprises a LAG3 inhibitory domain (SEQ ID NO:131). In some embodiments, the iCAR comprises a 2B4 inhibitory domain (SEQ ID NO:132). In some embodiments, the iCAR comprises a CD160 inhibitory domain (SEQ ID NO:133). In some embodiments, the iCAR comprises a CEACAM1 inhibitory domain (SEQ ID NO:134). In some embodiments, the iCAR comprises a TIM3 inhibitory domain (SEQ ID NO:135). In some embodiments, the iCAR comprises a VISTA inhibitory domain (SEQ ID NO:136). In some embodiments, the iCAR comprises a TIGIT inhibitory domain (SEQ ID NO:137). In some embodiments, the iCAR comprises a SIRPalpha inhibitory domain (SEQ ID NO:138). In some embodiments, the iCAR comprises a FcγRIIB inhibitory domain (SEQ ID NO:139). In some embodiments, the iCAR comprises a CD5 inhibitory domain (SEQ ID NO:140). In some embodiments, the iCAR comprises a CD300a inhibitory domain (SEQ ID NO:141). In some embodiments, the iCAR comprises a CD300f inhibitory domain (SEQ ID NO:142). In some embodiments, the iCAR comprises a LIR1 inhibitory domain (SEQ ID NO:143). In some embodiments, the iCAR comprises a LIR2 inhibitory domain (SEQ ID NO:144). In some embodiments, the iCAR comprises a LIR3 inhibitory domain (SEQ ID NO:145). In some embodiments, the iCAR comprises a LIR5 inhibitory domain (SEQ ID NO:146). In some embodiments, the iCAR comprises a LIR8 inhibitory domain (SEQ ID NO:147). In some embodiments, the iCAR comprises a Ly9 inhibitory domain (SEQ ID NO:148). In some embodiments, the iCAR comprises a 2xPD1(G4S) inhibitory domain (SEQ ID NO:149). In some embodiments, the iCAR comprises a 2xPD1(PD1) inhibitory domain (SEQ ID NO:150). In some embodiments, the iCAR comprises a PVRIg inhibitory domain (SEQ ID NO:151). In some embodiments, the iCAR comprises an AA2AR inhibitory domain (SEQ ID NO:152). In some embodiments, the iCAR comprises a signal peptide upstream of the iCAR portion, wherein the signal peptide is a CD8 alpha signal peptide (SEQ ID NO: 161), a GM-CSF signal peptide (SEQ ID NO: 162), or a mIgK signal peptide (SEQ ID NO: 306).

[0355] In some embodiments, the iCAR has a set of components shown in Tables 9-10 and/or an amino acid sequence shown in Tables 11-12.

TABLE 9
iCAR constructs

| | | VH | VL | | | | | |
|---|---|---|---|---|---|---|---|---|
| | | SEQ | SEQ | | | | | |
| | | ID | ID | Signal | scFv | | | |
| Construct | scFv | NO | NO | peptide | Linker | Hinge | TM | Signaling |
| | BB7.2 | 38 | 37 | CD8alpha | (G4S) × 3 | PD-1 | PD-1 | PD-1 |
| MC0096 | 3PF12/C4 | 40 | 39 | CD8alpha | (G4S) × 3 | PD-1 | PD-1 | PD-1 |
| (VR96) | | | | | | | | |
| MC0274 | 3PF12/F12 | 42 | 41 | CD8alpha | (G4S) × 3 | PD-1 | PD-1 | PD-1 |
| (VR274) | | | | | | | | |
| MC0276 | 3PF12/B11 | 44 | 43 | CD8alpha | (G4S) × 3 | PD-1 | PD-1 | PD-1 |
| (VR276) | | | | | | | | |
| MC0097 | W6/32 | 46 | 45 | CD8alpha | (G4S) × 3 | PD-1 | PD-1 | PD-1 |
| (VR97) | | | | | | | | |
| MC0098 | BBM.1 | 48 | 47 | CD8alpha | (G4S) × 3 | PD-1 | PD-1 | PD-1 |
| (VR98) | | | | | | | | |
| MC0099 | SN66E3.1 | 50 | 49 | CD8alpha | (G4S) × 3 | PD-1 | PD-1 | PD-1 |
| (VR99) | | | | | | | | |
| MC0100 | Ha5C2.A2 | 52 | 51 | CD8alpha | (G4S) × 3 | PD-1 | PD-1 | PD-1 |
| (VR100) | | | | | | | | |
| MC0101 | MWB1 | 54 | 53 | CD8alpha | (G4S) × 3 | PD-1 | PD-1 | PD-1 |
| (VR101) | | | | | | | | |
| MC0102 | MWB1.1d | 56 | 55 | CD8alpha | (G4S) × 3 | PD-1 | PD-1 | PD-1 |
| (VR102) | | | | | | | | |
| MC0372 | Hz.BB7.2 VH1-69_A18VK | 58 | 57 | CD8 alpha | (G4S) × 3 | CD8 alpha | CD8 alpha | 41BBz |
| (VR372) | | | | | | | | |
| MC0373 | Hz.BB7.2 VH1-69 (27, 30)_A18 | 60 | 59 | CD8 alpha | (G4S) × 3 | CD8 alpha | CD8 alpha | 41BBz |
| (VR373) | | | | | | | | |
| MC0374 | Hz.BB7.2 VH1-69 (27, 30, 48)_A18 | 62 | 61 | CD8 alpha | (G4S) × 3 | CD8 alpha | CD8 alpha | 41BBz |
| (VR374) | | | | | | | | |
| MC0375 | Hz.BB7.2 VH1-69 (27, 30, 67)_A18 | 64 | 63 | CD8 alpha | (G4S) × 3 | CD8 alpha | CD8 alpha | 41BBz |
| (VR375) | | | | | | | | |
| MC0376 | Hz.BB7.2 VH1-69 (27, 30, 69)_A18 | 66 | 65 | CD8 alpha | (G4S) × 3 | CD8 alpha | CD8 alpha | 41BBz |
| (VR376) | | | | | | | | |
| MC0377 | Hz.BB7.2 VH1-69 (27, 30, 67, 69)_A18 | 68 | 67 | CD8 alpha | (G4S) × 3 | CD8 alpha | CD8 alpha | 41BBz |
| (VR377) | | | | | | | | |
| MC0378 | Hz.BB7.2 VH1-3_A18 | 70 | 69 | CD8 alpha | (G4S) × 3 | CD8alpha | CD8 alpha | 41BBz |
| (VR378) | | | | | | | | |
| MC0379 | Hz.BB7.2 VH1-3(48)_A18 | 72 | 71 | CD8 alpha | (G4S) × 3 | CD8 alpha | CD8 alpha | 41BBz |
| (VR379) | | | | | | | | |
| MC0380 | Hz.BB7.2 VH1-3(67)_A18 | 74 | 73 | CD8 alpha | (G4S) × 3 | CD8 alpha | CD8 alpha | 41BBz |
| (VR380) | | | | | | | | |
| MC0381 | Hz.BB7.2 VH1-3(69)_A18 | 76 | 75 | CD8 alpha | (G4S) × 3 | CD8 alpha | CD8 alpha | 41BBz |
| (VR381) | | | | | | | | |
| MC0382 | Hz.BB7.2 VH1-3(71)_A18 | 78 | 77 | CD8 alpha | (G4S) × 3 | CD8 alpha | CD8 alpha | 41BBz |
| (VR382) | | | | | | | | |
| MC0383 | Hz.BB7.2 VH1-3(73)_A18 | 80 | 79 | CD8 alpha | (G4S) × 3 | CD8 alpha | CD8 alpha | 41BBz |
| (VR383) | | | | | | | | |
| MC0384 | 3PF12_274_LIR1_HER2_shRNA(A2) | 40 | 41 | CD8 alpha | 3PF12_274 | (G4S) × 3 | PD-1 | LIR-1 |
| (VR384) | | | | | | | | |
| MC0385 | 3PF12_276_LIR1_HER2_shRNA(A2) | 44 | 43 | CD8 alpha | 3PF12_276 | (G4S) × 3 | PD-1 | LIR-1 |
| (VR385) | | | | | | | | |
| MC0386 | MWB1.1_HL_LIR1_HER2_shRNA(A2) | 56 | 55 | CD8 alpha | MWB1.1_HL | (G4S) × 3 | PD-1 | LIR-1 |
| (VR386) | | | | | | | | |
| MC0387 | MWB1.1_LH_LIR1_HER2_shRNA(A2) | 56 | 55 | CD8 alpha | MWB1.1_LH | (G4S) × 3 | PD-1 | LIR-1 |
| (VR387) | | | | | | | | |
| MC0388 | MWB1.2_HL_LIR1_HER2_shRNA(A2) | 164 | 163 | CD8 alpha | MWB1.2_HL | (G4S) × 3 | PD-1 | LIR-1 |
| (VR388) | | | | | | | | |
| MC0389 | MWB1.2_LH_LIR1_HER2_shRNA(A2) | 164 | 163 | CD8 alpha | MWB1.2_LH | (G4S) × 3 | PD-1 | LIR-1 |
| (VR389) | | | | | | | | |
| MC0390 | SN66E3.1_HL_LIR1_HER2_shRNA(A2) | 50 | 49 | CD8 alpha | SN66E3.1_HL | (G4S) × 3 | PD-1 | LIR-1 |
| (VR390) | | | | | | | | |
| MC0391 | SN66E3.1_LH_LIR1_HER2_shRNA(A2) | 50 | 49 | CD8 alpha | SN66E3.1_LH | (G4S) × 3 | PD-1 | LIR-1 |
| (VR391) | | | | | | | | |
| MC0446 | SN66E3.2_HL_LIR1_HER2_{—} | 166 | 165 | CD8 alpha | SN66E3.2_HL | (G4S) × 3 | LIR1 | LIR-1 |
| (VR446) | | | | | | | | |
| MC0447 | SN66E3.2_LH_LIR1_HER2_{—} | 166 | 165 | CD8 alpha | SN66E3.2_LH | (G4S) × 3 | LIR1 | LIR-1 |
| (VR447) | | | | | | | | |
| MC0448 | SN66E3.3(HL)_LIR1(26)_HER2 | 284 | 283 | CD8 alpha | SN66E.3.3_HL | | LIR1 | LIR1 |
| (VR448) | | | | | | | | |
| MC449 | SN66E3.3(LH)_LIR1(26)_HER2 | 284 | 283 | CD8 alpha | SN66E3.3_LH | (G4S) × 3 | LIR1 | LIR1 |
| (VR449) | | | | | | | | |
| MC0428 | HzBB7.2.1_H69_LIR1_H | 64 | 63 | CD8 alpha | HzBB7.2_H69 | (G4S) × 3 | LIR1 | LIR-1 |
| (VR428) | | | | | | | | |
| MC0421 | HzBB7.2.2_H3_LIR1_) | 72 | 71 | CD8 alpha | HzBB7.2_H3 | (G4S) × 3 | LIR1 | LIR-1 |
| (VR421) | | | | | | | | |

TABLE 10
iCAR constructs

| | Construct | Signal | | scFv | | | |
|---|---|---|---|---|---|---|---|
| Construct | Name | Peptide | scFv | Linker | Hinge | TM | Signaling |
| MC0058 | 1 × ITIM | CD8alpha | BB7.2 | (G4S) × 3 | PD-1 | PD-1 | 1 × ITIM |
| (VR58) | | | VH VL | | | | PD-1 |
| MC0059 | 2 × ITIM | CD8alpha | BB7.2 | (G4S) × 3 | PD-1 | PD-1 | 2 × ITIM |
| (VR59) | | | VH VL | | | | PD-1 |
| MC0060 | 3 × ITIM | CD8alpha | BB7.2 | (G4S) × 3 | PD-1 | PD-1 | 3 × ITIM |
| (VR60) | | | VH VL | | | | PD-1 |
| MC0061 | 4 × ITIM | CD8alpha | BB7.2 | (G4S) × 3 | PD-1 | PD-1 | 4 × ITIM |
| (VR61) | | | VH VL | | | | PD-1 |
| MC0062 | 5 × ITIM | CD8alpha | BB7.2 | (G4S) × 3 | PD-1 | PD-1 | 5 × ITIM |
| (VR62) | | | VH VL | | | | PD-1 |
| MC0063 | 1 × ITSM | CD8alpha | BB7.2 | (G4S) × 3 | PD-1 | PD-1 | 1 × ITSM |
| (VR63) | | | VH VL | | | | PD-1 |
| MC0064 | 2 × ITSM | CD8alpha | BB7.2 | (G4S) × 3 | PD-1 | PD-1 | 2 × ITSM |
| (VR64) | | | VH VL | | | | PD-1 |
| MC0065 | 3 × ITSM | CD8alpha | BB7.2 | (G4S) × 3 | PD-1 | PD-1 | 3 × ITSM |
| (VR65) | | | VH VL | | | | PD-1 |
| MC0066 | 4 × ITSM | CD8alpha | BB7.2 | (G4S) × 3 | PD-1 | PD-1 | 4 × ITSM |
| (VR66) | | | VH VL | | | | PD-1 |
| MC0067 | 5 × ITSM | CD8alpha | BB7.2 | (G4S) × 3 | PD-1 | PD-1 | 5 × ITSM |
| (VR67) | | | VH VL | | | | PD-1 |
| MC0068 | 2 × PD1(G4S) | CD8alpha | BB7.2 | (G4S) × 3 | PD-1 | PD-1 | 2 × PD-1 |
| (VR68) | | | VH VL | | | | (G4S) × 2 |
| MC0069 | 2 × PD1(PD1) | CD8alpha | BB7.2 | (G4S) × 3 | PD-1 | PD-1 | 2 × PD-1 |
| (VR69) | | | VH VL | | | | (PD1 linker) |

TABLE 11
iCAR constructs

| | | SEQ | |
|---|---|---|---|
| | | ID | |
| Construct | scFv | NO | Amino acid sequence |
| MC0387 | MWB1.1_ | 255 | MALPVTALLLPLALLLHAARPQSALTQPPSASGSPGQSV |
| (VR387) | LH_LIR1_ | | TISCTGTSSDVGGYKYVSWYQHHPDKAPKLMIYEVNK |
| | HER2_ | | RPSGVPDRFSGSKSDNTASLTVSGLQAEDEADYYCSSY |
| | shRNA(A2) | | AGSNNWVFGGGTKLTVLGGGGSGGGGSGGGGSQVQL |
| | | | VESGGGVVQPGGSLRLSCAASGFTFSTYGMHWVRQAP |
| | | | GKGLEWVASISYDGSNKYYADSGQGRFTISRDTSKNSL |
| | | | YLQMNSLRAEDTAVYYCAIGIYGAYSFDYWGQGTLVT |
| | | | VSSTERRAEVPTAHPSPSPRPAGQFQTLVVGVVGGLLGS |
| | | | LVLLVWVLAVILRHRRQGKHWTSTQRKADFQHPAGAV |
| | | | GPEPTDRGLQWRSSPAADAQEENLYAAVKHTQPEDGV |
| | | | EMDTRSPHDEDPQAVTYAEVKHSRPRREMASPPSPLSG |
| | | | EFLDTKDRQAEEDRQMDTEAAASEAPQDVTYAQLHSL |
| | | | TLRREATEPPPSQEGPSPAVPSIYATLAIH |
| MC0389 | MWB1.2_ | 256 | MALPVTALLLPLALLLHAARPQSALTQPPSASGSPGQSV |
| (VR389) | LH_LIR1_ | | TISCTGTSSDVGGYKYVSWYQQHPGKAPKLMIYEVNK |
| | HER2_ | | RPSGVPDRFSGSKSGNTASLTVSGLQAEDEADYYCSSY |
| | shRNA(A2) | | AGSNNWVFGGGTKLTVLGGGGSGGGGSGGGGSQVQL |
| | | | VESGGGVVQPGGSLRLSCAASGFTFSTYGMHWVRQAP |
| | | | GKGLEWVASISYDGSNKYYADSGQGRFTISRDTSKNSL |
| | | | YLQMNSLRAEDTAVYYCAIGIYGAYSFDYWGQGTLVT |
| | | | VSSTERRAEVPTAHPSPSPRPAGQFQTLVVGVVGGLLGS |
| | | | LVLLVWVLAVILRHRRQGKHWTSTQRKADFQHPAGAV |
| | | | GPEPTDRGLQWRSSPAADAQEENLYAAVKHTQPEDGV |
| | | | EMDTRSPHDEDPQAVTYAEVKHSRPRREMASPPSPLSG |
| | | | EFLDTKDRQAEEDRQMDTEAAASEAPQDVTYAQLHSL |
| | | | TLRREATEPPPSQEGPSPAVPSIYATLAIH |
| MC0391 | SN66E3.1_ | 257 | MALPVTALLLPLALLLHAARPDIVMTQSPDSLAVSLGE |
| (VR391) | LH_LIR1_ | | RATISCKSSQSVLYSSNNKNYLAWYQQKLGQPPKLLIY |
| | HER2_ | | WASTRESGVPDRFSGSGSGTNFTLTISSLQAENVAVYYC |
| | shRNA(A2) | | QQYYGTPFTFGGGTKVEIKGGGGSGGGGSGGGGSQVQ |
| | | | LVQSGAEVKKPGASVKVSCKASGYTFTDYYLHWVRQA |
| | | | PGQGLEWMGWINPYTGGTNYAQKFQGRVTMTRDASIS |
| | | | TVYMELSGLTSDDTAVHFCARAGASYYDFWSGWVED |
| | | | YWGQGTLVTVSSTERRAEVPTAHPSPSPRPAGQFQTLV |
| | | | VGVVGGLLGSLVLLVWVLAVILRHRRQGKHWTSTQRK |
| | | | ADFQHPAGAVGPEPTDRGLQWRSSPAADAQEENLYAA |
| | | | VKHTQPEDGVEMDTRSPHDEDPQAVTYAEVKHSRPRR |
| | | | EMASPPSPLSGEFLDTKDRQAEEDRQMDTEAAASEAPQ |
| | | | DVTYAQLHSLTLRREATEPPPSQEGPSPAVPSIYATLAIH |
| MC0447 | SN66E3.2 | 258 | MALPVTALLLPLALLLHAARPDIVMTQSPDSLAVSLGE |
| (VR447) | (LH)_LIR1 | | RATISCKSSQSVLYSSNNKNYLAWYQQKPGQPPKLLIY |
| | (30)_HER2 | | WASTRESGVPDRFSGSGSGTDFTLTISSLQAEDVAVYYC |
| | | | QQYYGTPFTFGGGTKVEIKGGGGSGGGGSGGGGSQVQ |
| | | | LVQSGAEVKKPGASVKVSCKASGYTFTDYYLHWVRQA |
| | | | PGQGLEWMGWINPYTGGTNYAQKFQGRVTMTRDTSIS |
| | | | TAYMELSGLTSDDTAVYYCARAGASYYDFWSGWVED |
| | | | YWGQGTLVTVSSGPTSTSGPEDQPLTPTGSDPQSGLGR |
| | | | HLGVVIGILVAVILLLLLLLLLFLILRHRRQGKHWTSTQ |
| | | | RKADFQHPAGAVGPEPTDRGLQWRSSPAADAQEENLY |
| | | | AAVKHTQPEDGVEMDTRSPHDEDPQAVTYAEVKHSRP |
| | | | RREMASPPSPLSGEFLDTKDRQAEEDRQMDTEAAASEA |
| | | | PQDVTYAQLHSLTLRREATEPPPSQEGPSPAVPSIYATL |
| | | | AIH |
| MC0449 | SN66E3.3 | 305 | MALPVTALLLPLALLLHAARPDIVMTQSPDSLAVSLGE |
| (VR449) | (LH)_LIR1 | | RATISCKSSQSVLYSSNNKNYLAWYQQKPGQPPKLLIY |
| | (26)_HER2 | | WASTRESGVPDRFSGSGSGTDFTLTISSLQAEDVAVYYC |
| | | | QQYYGTPFTFGGGTKVEIKGGGGSGGGGSGGGGSQVQ |
| | | | LVQSGAEVKKPGASVKVSCKASGYTFTDYYLHWVRQA |
| | | | PGQGLEWMGWINPYTGGTNYAQKFQGRVTMTRDTSIS |
| | | | TAYMELSRLRSEDTAVYYCARAGASYYDFWSGWVFD |
| | | | YWGQGTLVTVSSTSGPEDQPLTPTGSDPQSGLGRHLGV |
| | | | VIGILVAVILLLLLLLLLFLILRHRRQGKHWTSTQRKADF |
| | | | QHPAGAVGPEPTDRGLQWRSSPAADAQEENLYAAVKH |
| | | | TQPEDGVEMDTRSPHDEDPQAVTYAEVKHSRPRREMA |
| | | | SPPSPLSGEFLDTKDRQAEEDRQMDTEAAASEAPQDVT |
| | | | YAQLHSLTLRREATEPPPSQEGPSPAVPSIYATLAIH |
| MC0428 | HzBB7.2.1_ | 259 | MALPVTALLLPLALLLHAARPQVQLVQSGAEVKKPGSS |
| (VR428) | _LIR1 | | VKVSCKASGYTFTSYHIQWVRQAPGQGLEWMGWIYPG |
| | (52)_HER2 | | DGSTQYNEKFKGRTTITADKSTSTAYMELSSLRSEDTA |
| | | | VYYCAREGTYYAMDYWGQGTLVTVSSGGGGSGGGGS |
| | | | GGGGSDVVMTQTPLSLSVTPGQPASISCRSSQSIVHSNG |
| | | | NTYLEWYLQKPGQSPQLLIYKVSNRFSGVPDRFSGSGS |
| | | | GTDFTLKISRVEAEDVGVYYCFQGSHVPRTFGGGTKVE |
| | | | IKHPSDPLELVVSGPSGGPSSPTTGPTSTSGPEDQPLTPT |
| | | | GSDPQSGLGRHLGVVIGILVAVILLLLLLLLLFLILRHRR |
| | | | QGKHWTSTQRKADFQHPAGAVGPEPTDRGLQWRSSPA |
| | | | ADAQEENLYAAVKHTQPEDGVEMDTRSPHDEDPQAVT |
| | | | YAEVKHSRPRREMASPPSPLSGEFLDTKDRQAEEDRQM |
| | | | DTEAAASEAPQDVTYAQLHSLTLRREATEPPPSQEGPSP |
| | | | AVPSIYATLAIH |
| MC0421 | HzBB7.2.2_ | 260 | MALPVTALLLPLALLLHAARPQVQLVQSGAEVKKPGA |
| (VR421) | _H3_LIR1_ | | SVKVSCKASGYTFTSYHIQWVRQAPGQRLEWIGWIYPG |
| | HER2_ | | DGSTQYNEKFKGRVTITRDTSASTAYMELSSLRSEDTA |
| | | | VYYCAREGTYYAMDYWGQGTLVTVSSGGGGSGGGGS |
| | | | GGGGSDVVMTQTPLSLSVTPGQPASISCRSSQSIVHSNG |
| | | | NTYLEWYLQKPGQSPQLLIYKVSNRFSGVPDRFSGSGS |
| | | | GTDFTLKISRVEAEDVGVYYCFQGSHVPRTFGGGTKVE |
| | | | IKHPSDPLELVVSGPSGGPSSPTTGPTSTSGPEDQPLTPT |
| | | | GSDPQSGLGRHLGVVIGILVAVILLLLLLLLLFLILRHRR |
| | | | QGKHWTSTQRKADFQHPAGAVGPEPTDRGLQWRSSPA |
| | | | ADAQEENLYAAVKHTQPEDGVEMDTRSPHDEDPQAVT |
| | | | YAEVKHSRPRREMASPPSPLSGEFLDTKDRQAEEDRQM |
| | | | DTEAAASEAPQDVTYAQLHSLTLRREATEPPPSQEGPSP |
| | | | AVPSIYATLAIH |

TABLE 12
iCAR constructs

| | | SEQ | |
|---|---|---|---|
| | Construct | ID | |
| Construct | Name | NO | full length iCAR sequence |
| MC0058 | 1xITIM | 261 | MALPVTALLLPLALLLHAARPEQKLISEEDLQVQLQQSGP |
| (VR58) | | | ELVKPGASVKMSCKASGYTFTSYHIQWVKQRPGQGLEWI |
| | | | GWIYPGDGSTQYNEKFKGKTTLTADKSSSTAYMLLSSLT |
| | | | SEDSAIYFCAREGTYYAMDYWGQGTSVTVSSGGGGSGG |
| | | | GGSGGGGSDVLMTQTPLSLPVSLGDQVSISCRSSQSIVHS |
| | | | NGNTYLEWYLQKPGQSPKLLIYKVSNRFSGVPDRESGSG |
| | | | SGTDFTLKISRVEAEDLGVYYCFQGSHVPRTFGGGTKLEI |
| | | | KTERRAEVPTAHPSPSPRPAGQFQTLVVGVVGGLLGSLV |
| | | | LLVWVLAVICSRAARGTIGARRTGQPLKEDPSAVPVFSV |
| | | | DYGELVFPSGMGTSSPARRGSADGPRSAQPLRPEDGHCS |
| | | | WPL |
| MC0059 | 2xITIM | 262 | MALPVTALLLPLALLLHAARPEQKLISEEDLQVQLQQSGP |
| (VR59) | | | ELVKPGASVKMSCKASGYTFTSYHIQWVKQRPGQGLEWI |
| | | | GWIYPGDGSTQYNEKFKGKTTLTADKSSSTAYMLLSSLT |
| | | | SEDSAIYFCAREGTYYAMDYWGQGTSVTVSSGGGGSGG |
| | | | GGSGGGGSDVLMTQTPLSLPVSLGDQVSISCRSSQSIVHS |
| | | | NGNTYLEWYLQKPGQSPKLLIYKVSNRFSGVPDRESGSG |
| | | | SGTDFTLKISRVEAEDLGVYYCFQGSHVPRTFGGGTKLEI |
| | | | KTERRAEVPTAHPSPSPRPAGQFQTLVVGVVGGLLGSLV |
| | | | LLVWVLAVICSRAARGTIGARRTGQPLKEDPSAVPVFSV |
| | | | DYGELDFQWREKTPEPPVPCVPEQVDYGELVFPSGMGTS |
| | | | SPARRGSADGPRSAQPLRPEDGHCSWPL |
| MC0060 | 3xITIM | 263 | MALPVTALLLPLALLLHAARPEQKLISEEDLQVQLQQSGP |
| (VR60) | | | ELVKPGASVKMSCKASGYTFTSYHIQWVKQRPGQGLEWI |
| | | | GWIYPGDGSTQYNEKFKGKTTLTADKSSSTAYMLLSSLT |
| | | | SEDSAIYFCAREGTYYAMDYWGQGTSVTVSSGGGGSGG |
| | | | GGSGGGGSDVLMTQTPLSLPVSLGDQVSISCRSSQSIVHS |
| | | | NGNTYLEWYLQKPGQSPKLLIYKVSNRFSGVPDRESGSG |
| | | | SGTDFTLKISRVEAEDLGVYYCFQGSHVPRTFGGGTKLEI |
| | | | KTERRAEVPTAHPSPSPRPAGQFQTLVVGVVGGLLGSLV |
| | | | LLVWVLAVICSRAARGTIGARRTGQPLKEDPSAVPVFSV |
| | | | DYGELDFQWREKTPEPPVPCVPEQVDYGELDFQWREKTP |
| | | | EPPVPCVPEQVDYGELVFPSGMGTSSPARRGSADGPRSA |
| | | | QPLRPEDGHCSWPL |
| MC0061 | 4xITIM | 264 | MALPVTALLLPLALLLHAARPEQKLISEEDLQVQLQQSGP |
| (VR61) | | | ELVKPGASVKMSCKASGYTFTSYHIQWVKQRPGQGLEWI |
| | | | GWIYPGDGSTQYNEKFKGKTTLTADKSSSTAYMLLSSLT |
| | | | SEDSAIYFCAREGTYYAMDYWGQGTSVTVSSGGGGSGG |
| | | | GGSGGGGSDVLMTQTPLSLPVSLGDQVSISCRSSQSIVHS |
| | | | NGNTYLEWYLQKPGQSPKLLIYKVSNRFSGVPDRESGSG |
| | | | SGTDFTLKISRVEAEDLGVYYCFQGSHVPRTFGGGTKLEI |
| | | | KTERRAEVPTAHPSPSPRPAGQFQTLVVGVVGGLLGSLV |
| | | | LLVWVLAVICSRAARGTIGARRTGQPLKEDPSAVPVFSV |
| | | | DYGELDFQWREKTPEPPVPCVPEQVDYGELDFQWREKTP |
| | | | EPPVPCVPEQVDYGELDFQWREKTPEPPVPCVPEQVDYG |
| | | | ELVFPSGMGTSSPARRGSADGPRSAQPLRPEDGHCSWPL |
| MC0062 | 5xITIM | 265 | MALPVTALLLPLALLLHAARPEQKLISEEDLQVQLQQSGP |
| (VR62) | | | ELVKPGASVKMSCKASGYTFTSYHIQWVKQRPGQGLEWI |
| | | | GWIYPGDGSTQYNEKFKGKTTLTADKSSSTAYMLLSSLT |
| | | | SEDSAIYFCAREGTYYAMDYWGQGTSVTVSSGGGGSGG |
| | | | GGSGGGGSDVLMTQTPLSLPVSLGDQVSISCRSSQSIVHS |
| | | | NGNTYLEWYLQKPGQSPKLLIYKVSNRFSGVPDRESGSG |
| | | | SGTDFTLKISRVEAEDLGVYYCFQGSHVPRTFGGGTKLEI |
| | | | KTERRAEVPTAHPSPSPRPAGQFQTLVVGVVGGLLGSLV |
| | | | LLVWVLAVICSRAARGTIGARRTGQPLKEDPSAVPVFSV |
| | | | DYGELDFQWREKTPEPPVPCVPEQVDYGELDFQWREKTP |
| | | | EPPVPCVPEQVDYGELDFQWREKTPEPPVPCVPEQVDYG |
| | | | ELDFQWREKTPEPPVPCVPEQVDYGELVFPSGMGTSSPA |
| | | | RRGSADGPRSAQPLRPEDGHCSWPL |
| MC0063 | 1xITSM | 266 | MALPVTALLLPLALLLHAARPEQKLISEEDLQVQLQQSGP |
| (VR63) | | | ELVKPGASVKMSCKASGYTFTSYHIQWVKQRPGQGLEWI |
| | | | GWIYPGDGSTQYNEKFKGKTTLTADKSSSTAYMLLSSLT |
| | | | SEDSAIYFCAREGTYYAMDYWGQGTSVTVSSGGGGSGG |
| | | | GGSGGGGSDVLMTQTPLSLPVSLGDQVSISCRSSQSIVHS |
| | | | NGNTYLEWYLQKPGQSPKLLIYKVSNRFSGVPDRESGSG |
| | | | SGTDFTLKISRVEAEDLGVYYCFQGSHVPRTFGGGTKLEI |
| | | | KTERRAEVPTAHPSPSPRPAGQFQTLVVGVVGGLLGSLV |
| | | | LLVWVLAVICSRAARGTIGARRTGQPLKEDPSAVPVFSTE |
| | | | YATIVFPSGMGTSSPARRGSADGPRSAQPLRPEDGHCSWP |
| | | | L |
| MC0064 | 2xITSM | 267 | MALPVTALLLPLALLLHAARPEQKLISEEDLQVQLQQSGP |
| (VR64) | | | ELVKPGASVKMSCKASGYTFTSYHIQWVKQRPGQGLEWI |
| | | | GWIYPGDGSTQYNEKFKGKTTLTADKSSSTAYMLLSSLT |
| | | | SEDSAIYFCAREGTYYAMDYWGQGTSVTVSSGGGGSGG |
| | | | GGSGGGGSDVLMTQTPLSLPVSLGDQVSISCRSSQSIVHS |
| | | | NGNTYLEWYLQKPGQSPKLLIYKVSNRFSGVPDRESGSG |
| | | | SGTDFTLKISRVEAEDLGVYYCFQGSHVPRTFGGGTKLEI |
| | | | KTERRAEVPTAHPSPSPRPAGQFQTLVVGVVGGLLGSLV |
| | | | LLVWVLAVICSRAARGTIGARRTGQPLKEDPSAVPVFSTE |
| | | | YATIDFQWREKTPEPPVPCVPEQTEYATIVFPSGMGTSSP |
| | | | ARRGSADGPRSAQPLRPEDGHCSWPL |
| MC0065 | 3xITSM | 268 | MALPVTALLLPLALLLHAARPEQKLISEEDLQVQLQQSGP |
| (VR65) | | | ELVKPGASVKMSCKASGYTFTSYHIQWVKQRPGQGLEWI |
| | | | GWIYPGDGSTQYNEKFKGKTTLTADKSSSTAYMLLSSLT |
| | | | SEDSAIYFCAREGTYYAMDYWGQGTSVTVSSGGGGSGG |
| | | | GGSGGGGSDVLMTQTPLSLPVSLGDQVSISCRSSQSIVHS |
| | | | NGNTYLEWYLQKPGQSPKLLIYKVSNRFSGVPDRESGSG |
| | | | SGTDFTLKISRVEAEDLGVYYCFQGSHVPRTFGGGTKLEI |
| | | | KTERRAEVPTAHPSPSPRPAGQFQTLVVGVVGGLLGSLV |
| | | | LLVWVLAVICSRAARGTIGARRTGQPLKEDPSAVPVFSTE |
| | | | YATIDFQWREKTPEPPVPCVPEQTEYATIDFQWREKTPEP |
| | | | PVPCVPEQTEYATIVFPSGMGTSSPARRGSADGPRSAQPL |
| | | | RPEDGHCSWPL |
| MC0066 | 4xITSM | 269 | MALPVTALLLPLALLLHAARPEQKLISEEDLQVQLQQSGP |
| (VR66) | | | ELVKPGASVKMSCKASGYTFTSYHIQWVKQRPGQGLEWI |
| | | | GWIYPGDGSTQYNEKFKGKTTLTADKSSSTAYMLLSSLT |
| | | | SEDSAIYFCAREGTYYAMDYWGQGTSVTVSSGGGGSGG |
| | | | GGSGGGGSDVLMTQTPLSLPVSLGDQVSISCRSSQSIVHS |
| | | | NGNTYLEWYLQKPGQSPKLLIYKVSNRFSGVPDRESGSG |
| | | | SGTDFTLKISRVEAEDLGVYYCFQGSHVPRTFGGGTKLEI |
| | | | KTERRAEVPTAHPSPSPRPAGQFQTLVVGVVGGLLGSLV |
| | | | LLVWVLAVICSRAARGTIGARRTGQPLKEDPSAVPVFSTE |
| | | | YATIDFQWREKTPEPPVPCVPEQTEYATIDFQWREKTPEP |
| | | | PVPCVPEQTEYATIDFQWREKTPEPPVPCVPEQTEYATIVF |
| | | | PSGMGTSSPARRGSADGPRSAQPLRPEDGHCSWPL |
| MC0067 | 5xITSM | 270 | MALPVTALLLPLALLLHAARPEQKLISEEDLQVQLQQSGP |
| (VR67) | | | ELVKPGASVKMSCKASGYTFTSYHIQWVKQRPGQGLEWI |
| | | | GWIYPGDGSTQYNEKFKGKTTLTADKSSSTAYMLLSSLT |
| | | | SEDSAIYFCAREGTYYAMDYWGQGTSVTVSSGGGGSGG |
| | | | GGSGGGGSDVLMTQTPLSLPVSLGDQVSISCRSSQSIVHS |
| | | | NGNTYLEWYLQKPGQSPKLLIYKVSNRFSGVPDRESGSG |
| | | | SGTDFTLKISRVEAEDLGVYYCFQGSHVPRTFGGGTKLEI |
| | | | KTERRAEVPTAHPSPSPRPAGQFQTLVVGVVGGLLGSLV |
| | | | LLVWVLAVICSRAARGTIGARRTGQPLKEDPSAVPVFSTE |
| | | | YATIDFQWREKTPEPPVPCVPEQTEYATIDFQWREKTPEP |
| | | | PVPCVPEQTEYATIDFQWREKTPEPPVPCVPEQTEYATIDF |
| | | | QWREKTPEPPVPCVPEQTEYATIVFPSGMGTSSPARRGSA |
| | | | DGPRSAQPLRPEDGHCSWPL |
| MC0068 | 2xPD1(G4S) | 271 | MALPVTALLLPLALLLHAARPEQKLISEEDLQVQLQQSGP |
| (VR68) | | | ELVKPGASVKMSCKASGYTFTSYHIQWVKQRPGQGLEWI |
| | | | GWIYPGDGSTQYNEKFKGKTTLTADKSSSTAYMLLSSLT |
| | | | SEDSAIYFCAREGTYYAMDYWGQGTSVTVSSGGGGSGG |
| | | | GGSGGGGSDVLMTQTPLSLPVSLGDQVSISCRSSQSIVHS |
| | | | NGNTYLEWYLQKPGQSPKLLIYKVSNRFSGVPDRFSGSG |
| | | | SGTDFTLKISRVEAEDLGVYYCFQGSHVPRTFGGGTKLEI |
| | | | KTERRAEVPTAHPSPSPRPAGQFQTLVVGVVGGLLGSLV |
| | | | LLVWVLAVICSRAARGTIGARRTGQPLKEDPSAVPVFSV |
| | | | DYGELDFQWREKTPEPPVPCVPEQTEYATIVFPSGMGTSS |
| | | | PARRGSADGPRSAQPLRPEDGHCSWPLGGGGSGGGGSCS |
| | | | RAARGTIGARRTGQPLKEDPSAVPVFSVDYGELDFQWRE |
| | | | KTPEPPVPCVPEQTEYATIVFPSGMGTSSPARRGSADGPRS |
| | | | AQPLRPEDGHCSWPL |
| MC0069 | 2xPD1(PD1) | 272 | MALPVTALLLPLALLLHAARPEQKLISEEDLQVQLQQSGP |
| (VR69) | | | ELVKPGASVKMSCKASGYTFTSYHIQWVKQRPGQGLEWI |
| | | | GWIYPGDGSTQYNEKFKGKTTLTADKSSSTAYMLLSSLT |
| | | | SEDSAIYFCAREGTYYAMDYWGQGTSVTVSSGGGGSGG |
| | | | GGSGGGGSDVLMTQTPLSLPVSLGDQVSISCRSSQSIVHS |
| | | | NGNTYLEWYLQKPGQSPKLLIYKVSNRFSGVPDRESGSG |
| | | | SGTDFTLKISRVEAEDLGVYYCFQGSHVPRTFGGGTKLEI |
| | | | KTERRAEVPTAHPSPSPRPAGQFQTLVVGVVGGLLGSLV |
| | | | LLVWVLAVICSRAARGTIGARRTGQPLKEDPSAVPVFSV |
| | | | DYGELDFQWREKTPEPPVPCVPEQTEYATIDFQWREKTP |
| | | | EPPVPCVPEQVDYGELDFQWREKTPEPPVPCVPEQTEYAT |
| | | | IVFPSGMGTSSPARRGSADGPRSAQPLRPEDGHCSWPL |
| MC0456 | LIR1(ITIM1) | 327 | MALPVTALLLPLALLLHAARPQVQLVQSGAEVKKPGASV |
| (VR456) | X4 | | KVSCKASGYTFTSYHIQWVRQAPGQRLEWIGWIYPGDGS |
| | | | TQYNEKFKGRVTITRDTSASTAYMELSSLRSEDTAVYYC |
| | | | AREGTYYAMDYWGQGTLVTVSSGGGGSGGGGSGGGGS |
| | | | DVVMTQTPLSLSVTPGQPASISCRSSQSIVHSNGNTYLEW |
| | | | YLQKPGQSPQLLIYKVSNRFSGVPDRFSGSGSGTDFTLKIS |
| | | | RVEAEDVGVYYCFQGSHVPRTFGGGTKVEIKTERRAEVP |
| | | | TAHPSPSPRPAGQFQTLVVGVVGGLLGSLVLLVWVLAVI |
| | | | LRHRRQGKHWTSTQRKADFQHPAGAVGPEPTDRGLQWR |
| | | | SSPAADAQEENLYAAVKHTQPEDGVEMDTRSPHDEDPQ |
| | | | ANLYAAVKHSRPRREMASPPSPLSGEFLDTKDRQAEEDR |
| | | | QMDTEAAASEAPQDNLYAAVHSLTLRREATEPPPSQEGP |
| | | | SPAVPNLYAAVAIH |
| MC0457 | LIR1(ITIM2) | 328 | MALPVTALLLPLALLLHAARPQVQLVQSGAEVKKPGASV |
| (VR457) | X4 | | KVSCKASGYTFTSYHIQWVRQAPGQRLEWIGWIYPGDGS |
| | | | TQYNEKFKGRVTITRDTSASTAYMELSSLRSEDTAVYYC |
| | | | AREGTYYAMDYWGQGTLVTVSSGGGGSGGGGSGGGGS |
| | | | DVVMTQTPLSLSVTPGQPASISCRSSQSIVHSNGNTYLEW |
| | | | YLQKPGQSPQLLIYKVSNRFSGVPDRFSGSGSGTDFTLKIS |
| | | | RVEAEDVGVYYCFQGSHVPRTFGGGTKVEIKTERRAEVP |
| | | | TAHPSPSPRPAGQFQTLVVGVVGGLLGSLVLLVWVLAVI |
| | | | LRHRRQGKHWTSTQRKADFQHPAGAVGPEPTDRGLQWR |
| | | | SSPAADAQEEVTYAEVKHTQPEDGVEMDTRSPHDEDPQ |
| | | | AVTYAEVKHSRPRREMASPPSPLSGEFLDTKDRQAEEDR |
| | | | QMDTEAAASEAPQDVTYAEVHSLTLRREATEPPPSQEGP |
| | | | SPAVPVTYAEVAIH |
| MC0458 | LIR1(ITIM3) | 329 | MALPVTALLLPLALLLHAARPQVQLVQSGAEVKKPGASV |
| (VR458) | X4 | | KVSCKASGYTFTSYHIQWVRQAPGQRLEWIGWIYPGDGS |
| | | | TQYNEKFKGRVTITRDTSASTAYMELSSLRSEDTAVYYC |
| | | | AREGTYYAMDYWGQGTLVTVSSGGGGSGGGGSGGGGS |
| | | | DVVMTQTPLSLSVTPGQPASISCRSSQSIVHSNGNTYLEW |
| | | | YLQKPGQSPQLLIYKVSNRFSGVPDRFSGSGSGTDFTLKIS |
| | | | RVEAEDVGVYYCFQGSHVPRTFGGGTKVEIKTERRAEVP |
| | | | TAHPSPSPRPAGQFQTLVVGVVGGLLGSLVLLVWVLAVI |
| | | | LRHRRQGKHWTSTQRKADFQHPAGAVGPEPTDRGLQWR |
| | | | SSPAADAQEEVTYAQLKHTQPEDGVEMDTRSPHDEDPQ |
| | | | AVTYAQLKHSRPRREMASPPSPLSGEFLDTKDRQAEEDR |
| | | | QMDTEAAASEAPQDVTYAQLHSLTLRREATEPPPSQEGP |
| | | | SPAVPVTYAQLAIH |
| MC0459 | LIR1(ITM4) | 330 | MALPVTALLLPLALLLHAARPQVQLVQSGAEVKKPGASV |
| (VR459) | X4 | | KVSCKASGYTFTSYHIQWVRQAPGQRLEWIGWIYPGDGS |
| | | | TQYNEKFKGRVTITRDTSASTAYMELSSLRSEDTAVYYC |
| | | | AREGTYYAMDYWGQGTLVTVSSGGGGSGGGGSGGGGS |
| | | | DVVMTQTPLSLSVTPGQPASISCRSSQSIVHSNGNTYLEW |
| | | | YLQKPGQSPQLLIYKVSNRFSGVPDRFSGSGSGTDFTLKIS |
| | | | RVEAEDVGVYYCFQGSHVPRTFGGGTKVEIKTERRAEVP |
| | | | TAHPSPSPRPAGQFQTLVVGVVGGLLGSLVLLVWVLAVI |
| | | | LRHRRQGKHWTSTQRKADFQHPAGAVGPEPTDRGLQWR |
| | | | SSPAADAQEESIYATLKHTQPEDGVEMDTRSPHDEDPQA |
| | | | SIYATLKHSRPRREMASPPSPLSGEFLDTKDRQAEEDRQM |
| | | | DTEAAASEAPQDSIYATLHSLTLRREATEPPPSQEGPSPAV |
| | | | PSIYATLAIH |
| MC0460 | LIR1ITIM | 331 | MALPVTALLLPLALLLHAARPQVQLVQSGAEVKKPGASV |
| (VR460) | (3-4) | | KVSCKASGYTFTSYHIQWVRQAPGQRLEWIGWIYPGDGS |
| | | | TQYNEKFKGRVTITRDTSASTAYMELSSLRSEDTAVYYC |
| | | | AREGTYYAMDYWGQGTLVTVSSGGGGSGGGGSGGGGS |
| | | | DVVMTQTPLSLSVTPGQPASISCRSSQSIVHSNGNTYLEW |
| | | | YLQKPGQSPQLLIYKVSNRFSGVPDRFSGSGSGTDFTLKIS |
| | | | RVEAEDVGVYYCFQGSHVPRTFGGGTKVEIKTERRAEVP |
| | | | TAHPSPSPRPAGQFQTLVVGVVGGLLGSLVLLVWVLAVI |
| | | | LRHRRQGKHWTSTQRKADFQHPAGAVGPEPTDRGLQWR |
| | | | SSPAADAQEEVTYAQLKHTQPEDGVEMDTRSPHDEDPQ |
| | | | ASIYATLKHSRPRREMASPPSPLSGEFLDTKDRQAEEDRQ |
| | | | MDTEAAASEAPQDVTYAQLHSLTLRREATEPPPSQEGPSP |
| | | | AVPSIYATLAIH |
| MC0461 | PD-1ITSM | 332 | MALPVTALLLPLALLLHAARPQVQLVQSGAEVKKPGASV |
| (VR461) | LIR1 | | KVSCKASGYTFTSYHIQWVRQAPGQRLEWIGWIYPGDGS |
| | (ITIM3-4) | | TQYNEKFKGRVTITRDTSASTAYMELSSLRSEDTAVYYC |
| | | | AREGTYYAMDYWGQGTLVTVSSGGGGSGGGGSGGGGS |
| | | | DVVMTQTPLSLSVTPGQPASISCRSSQSIVHSNGNTYLEW |
| | | | YLQKPGQSPQLLIYKVSNRFSGVPDRFSGSGSGTDFTLKIS |
| | | | RVEAEDVGVYYCFQGSHVPRTFGGGTKVEIKTERRAEVP |
| | | | TAHPSPSPRPAGQFQTLVVGVVGGLLGSLVLLVWVLAVI |
| | | | LRHRRQGKHWTSTQRKADFQHPAGAVGPEPTDRGLQWR |
| | | | SSPAADAQEETEYATIKHTQPEDGVEMDTRSPHDEDPQA |
| | | | TEYATIKHSRPRREMASPPSPLSGEFLDTKDRQAEEDRQM |
| | | | DTEAAASEAPQDVTYAQLHSLTLRREATEPPPSQEGPSPA |
| | | | VPSIYATLAIH |
| MC0462 | LIR1 | 333 | MALPVTALLLPLALLLHAARPQVQLVQSGAEVKKPGASV |
| (VR462) | (ITIM3-4) | | KVSCKASGYTFTSYHIQWVRQAPGQRLEWIGWIYPGDGS |
| | PD- | | TQYNEKFKGRVTITRDTSASTAYMELSSLRSEDTAVYYC |
| | 1ITSMX2 | | AREGTYYAMDYWGQGTLVTVSSGGGGSGGGGSGGGGS |
| | | | DVVMTQTPLSLSVTPGQPASISCRSSQSIVHSNGNTYLEW |
| | | | YLQKPGQSPQLLIYKVSNRFSGVPDRESGSGSGTDFTLKIS |
| | | | RVEAEDVGVYYCFQGSHVPRTFGGGTKVEIKTERRAEVP |
| | | | TAHPSPSPRPAGQFQTLVVGVVGGLLGSLVLLVWVLAVI |
| | | | LRHRRQGKHWTSTQRKADFQHPAGAVGPEPTDRGLQWR |
| | | | SSPAADAQEEVTYAQLKHTQPEDGVEMDTRSPHDEDPQ |
| | | | ASIYATLKHSRPRREMASPPSPLSGEFLDTKDRQAEEDRQ |
| | | | MDTEAAASEAPQDTEYATIHSLTLRREATEPPPSQEGPSP |
| | | | AVPTEYATIAIH |
| MC0463 | LIR1 | 334 | MALPVTALLLPLALLLHAARPQVQLVQSGAEVKKPGASV |
| (VR463) | ITIM3, | | KVSCKASGYTFTSYHIQWVRQAPGQRLEWIGWIYPGDGS |
| | PD-1 | | TQYNEKFKGRVTITRDTSASTAYMELSSLRSEDTAVYYC |
| | (ITSM)X2, | | AREGTYYAMDYWGQGTLVTVSSGGGGSGGGGSGGGGS |
| | LIR1 ITIM4 | | DVVMTQTPLSLSVTPGQPASISCRSSQSIVHSNGNTYLEW |
| | | | YLQKPGQSPQLLIYKVSNRFSGVPDRFSGSGSGTDFTLKIS |
| | | | RVEAEDVGVYYCFQGSHVPRTFGGGTKVEIKTERRAEVP |
| | | | TAHPSPSPRPAGQFQTLVVGVVGGLLGSLVLLVWVLAVI |
| | | | LRHRRQGKHWTSTQRKADFQHPAGAVGPEPTDRGLQWR |
| | | | SSPAADAQEEVTYAQLKHTQPEDGVEMDTRSPHDEDPQ |
| | | | ATEYATIKHSRPRREMASPPSPLSGEFLDTKDRQAEEDRQ |
| | | | MDTEAAASEAPQDTEYATIHSLTLRREATEPPPSQEGPSP |
| | | | AVPSIYATLAIH |

[0356] In some embodiments, the iCAR comprises an amino acid sequence selected from the group consisting of SEQ ID NO: 255, SEQ ID NO:256, SEQ ID NO:257, SEQ ID NO:258, SEQ ID NO:305, SEQ ID NO:259, SEQ ID NO:260, SEQ ID NO:261, SEQ ID NO:262, SEQ ID NO:263, SEQ ID NO:264, SEQ ID NO:265, SEQ ID NO:266, SEQ ID NO:267, SEQ ID NO:268, SEQ ID NO:269, SEQ ID NO:270, SEQ ID NO:271, SEQ ID NO:272, SEQ ID NO:327, SEQ ID NO:328, SEQ ID NO:329, SEQ ID NO:330, SEQ ID NO:331, SEQ ID NO:332, SEQ ID NO:333, and SEQ ID NO:334.

[0357] 7. iCAR Portion/aCAR Portion: Linker

[0358] In some embodiments, the iCAR portion is covalently linked to the aCAR portion via a linker. In a certain embodiment, the linker is a gly-ser polypeptide linker, i.e., a peptide that consists of glycine and serine residues. Exemplary gly-ser polypeptide linkers comprise the amino acid sequence Ser(Gly₄Ser)ₙ, as well as (Gly₄Ser)ₙ and/or (Gly₄Ser₃)ₙ. In some embodiments, n=1. In some embodiments, n=2. In some embodiments, n=3, i.e., Ser(Gly₄Ser)₃. In some embodiments, n=4, i.e., Ser(Gly₄Ser)₄. In some embodiments, n=5. In some embodiments, n=6. In some embodiments, n=7. In some embodiments, n=8. In some embodiments, n=9. In some embodiments, n=10. Another exemplary gly-ser polypeptide linker comprises the amino acid sequence Ser(Gly₄Ser)ₙ. In some embodiments, n=1. In some embodiments, n=2. In some embodiments, n=3. In another embodiment, n=4. In some embodiments, n=5. In some embodiments, n=6. Another exemplary gly-ser polypeptide linker comprises (Gly₄Ser)ₙ. In some embodiments, n=1. In some embodiments, n=2. In some embodiments, n=3. In some embodiments, n=4. In some embodiments, n=5. In some embodiments, n=6. Another exemplary gly-ser polypeptide linker comprises (Gly₃Ser)ₙ. In some embodiments, n=1. In some embodiments, n=2. In some embodiments, n=3. In some embodiments, n=4. In another embodiment, n=5. In yet another embodiment, n=6. Another exemplary gly-ser polypeptide linker comprises (Gly₄Ser₃)ₙ. In some embodiments, n=1. In some embodiments, n=2. In some embodiments, n=3. In some embodiments, n=4. In some embodiments, n=5. In some embodiments, n=6. Another exemplary gly-ser polypeptide linker comprises (Gly₃Ser)ₙ. In some embodiments, n=1. In some embodiments, n=2. In some embodiments, n=3. In some embodiments, n=4. In another embodiment, n=5. In yet another embodiment, n=6.

[0359] In some embodiments, the bicistronic construct comprises a linker that covalently connects the iCAR portion and the aCAR portion. In some embodiments, the bicistronic construct comprises a viral self-cleaving 2A peptide between the nucleic acid sequence encoding the iCAR portion and the nucleic acid sequence encoding the aCAR portion of the construct. In some embodiments, the viral self-cleaving 2A peptide includes T2A from Thosea asigna virus (TaV). In some embodiments, the iCAR portion is covalently linked to the aCAR portion via a linker. In some embodiments, the iCAR portion is covalently linked to the aCAR portion via a GSG. In some embodiments, the iCAR portion is covalently linked to the aCAR portion via a GGGGS linker (SEQ ID NO: 153). In some embodiments, the iCAR portion is covalently linked to the aCAR portion via a GGGGSGGGGSGGGGS linker (SEQ ID NO:154). In some embodiments, the iCAR is covalently linked to the aCAR portion via a T2A linker (SEQ ID NO: 155). In some embodiments, the iCAR is covalently linked to the aCAR portion via a F2A linker (SEQ ID NO: 156). In some embodiments, the iCAR is covalently linked to the aCAR portion via a P2A linker (SEQ ID NO:157). In some embodiments, the GAR is covalently linked to the aCAR portion via a E2A linker (SEQ ID NO:158). In some embodiments, the AR is covalently linked to the aCAR portion via a IRES long linker (SEQ ID NO:159). In some embodiments, the iCAR is covalently linked to the aCAR portion via a IRES short linker (SEQ ID NO: 160).

TABLE 13
iCAR portion/aCAR portion linker sequences

| Sequence | | |
|---|---|---|
| Information | SEQ ID NO | Amino acid sequence |
| G₄S | 153 | GGGGS |
| (G₄S)X3 | 154 | GGGGSGGGGSGGGGS |
| T2A | 155 | GSGEGRGSLLTCGDVEENPGP |
| F2A | 156 | GSGVKQTLNFDLLKLAGDVESNPGP |
| P2A | 157 | GSGATNFSLLKQAGDVEENPGP |
| E2A | 158 | GSGQCTNYALLKLAGDVESNPGP |
| IRES long | 159 | CCCCCCCCCCTAACGTTACTGGCCGAAGCCGCTT |
| | | GGAATAAGGCCGGTGTGCGTTTGTCTATATGTTA |
| | | TTTTCCACCATATTGCCGTCTTTTGGCAATGTGAG |
| | | GGCCCGGAAACCTGGCCCTGTCTTCTTGACGAGC |
| | | ATTCCTAGGGGTCTTTCCCCTCTCGCCAAAGGAA |
| | | TGCAAGGTCTGTTGAATGTCGTGAAGGAAGCAGT |
| | | TCCTCTGGAAGCTTCTTGAAGACAAACAACGTCT |
| | | GTAGCGACCCTTTGCAGGCAGCGGAACCCCCCAC |
| | | CTGGCGACAGGTGCCTCTGCGGCCAAAAGCCACG |
| | | TGTATAAGATACACCTGCAAAGGCGGCACAACCC |
| | | CAGTGCCACGTTGTGAGTTGGATAGTTGTGGAAA |
| | | GAGTCAAATGGCTCTCCTCAAGCGTATTCAACAA |
| | | GGGGCTGAAGGATGCCCAGAAGGTACCCCATTGT |
| | | ATGGGATCTGATCTGGGGCCTCGGTGCACATGCT |
| | | TTACATGTGTTTAGTCGAGGTTAAAAAAACGTCT |
| | | AGGCCCCCCGAACCACGGGGACGTGGTTTTCCTT |
| | | TGAAAAACACGATGATAATATG |
| IRES short | 160 | CCCCTCTCGCCAAAGGAATGCAAGGTCTGTTGAA |
| | | TGTCGTGAAGGAAGCAGTTCCTCTGGAAGCTTCT |
| | | TGAAGACAAACAACGTCTGTAGCGACCCTTTGCA |
| | | GGCAGCGGAACCCCCCACCTGGCGACAGGTGCCT |
| | | CTGCGGCCAAAAGCCACGTGTATAAGATACACCT |
| | | GCAAAGGCGGCACAACCCCAGTGCCACGTTGTG |
| | | AGTTGGATAGTTGTGGAAAGAGTCAAATGGCTCT |
| | | CCTCAAGCGTATTCAACAAGGGGCTGAAGGATGC |
| | | CCAGAAGGTACCCCATTGTATGGGATCTGATCTG |
| | | GGGCCTCGGTGCACATGCTTTACATGTGTTTAGT |
| | | CGAGGTTAAAAAAACGTCTAGGCCCCCCGAACC |
| | | ACGGGGACGTGGTTTTCCTTTGAAAAACACGATG |
| | | ATAATATG |

[0360] 8. iCAR Portion/aCAR Portion: Signal Peptide

[0361] In some embodiments, the bicistronic construct comprises a signal peptide upstream of the iCAR and aCAR portions. In some embodiments, the signal peptide is a CD8 alpha signal peptide (SEQ ID NO: 161). In some embodiments, the signal peptide is a GM-CSF signal peptide (SEQ ID NO: 162). In some embodiments, the signal peptide is a mIgK signal peptide (SEQ ID NO: 306).

TABLE 14
iCAR/aCAR signal peptide sequences

| Sequence | | |
|---|---|---|
| Information | SEQ ID NO | Amino acid sequence |
| CD8 alpha | 161 | MALPVTALLLPLALLLHAARP |
| GM-CSF | 162 | MLLLVTSLLLCELPHPAFLLIP |
| mIgK | 306 | MSVPTQVLGLLLLWLTDARC |

[0362] 9. aCAR Portion: aCAR Scfv

[0363] In some embodiments, the bicistronic construct comprises an aCAR portion comprising a single chain variable fragment (scFv) component. In some embodiments, the iCAR portion comprises an scFv component. In some embodiments, the scFv targets Her2, Mesothelin, or EGFR. In some embodiments, the scFv targets Her2. In some embodiments, the scFv targets Mesothelin. In some embodiments, the scFv targets EGFR. In some embodiments, the scFv is an scFv based on trastuzumab (anti-Her2 antibody, also referred to as HERCEPTIN*), pertuzumab (anti-Her2 antibody, also referred to as PERJETA*), another commercial anti-Her2 antibody including, but not limited to, FRP5, A21, XMT1517, XMT1518, XMT1519, FWP51, bioequivalents thereof, or biosimilars thereof. In some embodiments, the scFv has the VH and VL domains of trastuzumab, pertuzumab, FRP5, A21, XMT1517, XMT1518, XMT1519, FWP51, bioequivalents thereof, or biosimilars thereof. In some embodiments, the scFv is an scFv based on cetuximab (anti-EGFR antibody, also referred to as ERBITUX*), panitumumab (anti-EGFR antibody, also referred to as VECTIBIX*), another commercial anti-EGFR antibody including, but not limited to, Imgatuzumab, Nimotuzumab, Necitumumab, ICR62, Matuzumab, C10, Zalutumumab, PIX, P2X, P3X, EGFR-1a1-VHH, bioequivalents thereof, or biosimilars thereof. In some embodiments, the scFv has the VH and VL domains of cetuximab, panitumumab, Imgatuzumab, Nimotuzumab, Necitumumab, ICR62, Matuzumab, C10, Zalutumumab, PIX, P2X, P3X, EGFR-1a1-VHH, bioequivalents thereof, or biosimilars thereof. In some embodiments, the scFv is an scFv based on a commercial anti-Mesothelin antibody including, but not limited to, Amatuximab, P4, SS1, SD1, SD2, 1H7, 3C02, bioequivalents thereof, or biosimilars thereof. In some embodiments, the scFv has the VH and VL domains of Amatuximab, P4, SS1, SD1, SD2, 1H7, 3C02, bioequivalents thereof, or biosimilars thereof.

[0364] In some embodiments, the scFv targets Her2. In some embodiments, the Her2 scFv is based on the Vh and Vl from trastuzumab or pertuzumab. In some embodiments, the Her2 scFv is based on the Vh and Vl from trastuzumab. In some embodiments, the Her2 scFv is based on the Vh and Vl from pertuzumab. The Vh and VI chains for trastuzumab and pertuzumab are provided below in Tables 15 and 16. In some embodiments, the Her2 scFv is based on the Vh and Vl from FRP5. In some embodiments, the Her2 scFv is based on the Vh and Vl from A21. In some embodiments, the Her2 scFv is based on the Vh and Vl from XMT1517. In some embodiments, the Her2 scFv is based on the Vh and Vl from XMT1518. In some embodiments, the Her2 scFv is based on the Vh and Vl from XMT1519. In some embodiments, the Her2 scFv is based on the Vh and Vl from FWP51. In some embodiments, the Her2 scFv is based on the Vh and Vl from trastuzumab F9G.

TABLE 15
anti-Her2 sequences

| | SEQ | |
|---|---|---|
| Sequence | ID | |
| Information | NO | Amino acid sequence |
| trastuzumab | 170 | EVQLVESGGGLVQPGGSLRLSCAASGFNIKDTYIHWVRQAP |
| Variable heavy | | GKGLEWVARIYPTNGYTRYADSVKGRFTISADTSKNTAYLQ |
| chain | | MNSLRAEDTAVYYCSRWGGDGFYAMDYWGQGTLVTVSS |
| trastuzumab | 171 | DIQMTQSPSSLSASVGDRVTITCRASQDVNTAVAWYQQKPG |
| Variable light | | KAPKLLIYSASFLYSGVPSRESGSRSGTDFTLTISSLQPEDFAT |
| chain | | YYCQQHYTTPPTFGQGTKVEIK |
| trastuzumab | 172 | EVQLVESGGGLVQPGGSLRLSCAASGFNIKDTYIHWVRQAP |
| scFv | | GKGLEWVARIYPTNGYTRYADSVKGRFTISADTSKNTAYLQ |
| | | MNSLRAEDTAVYYCSRWGGDGFYAMDYWGQGTLVTVSS |
| | | GSTSGSGKPGSGEGSTKGDIQMTQSPSSLSASVGDRVTITC |
| | | RASQDVNTAVAWYQQKPGKAPKLLIYSASFLYSGVPSRFSG |
| | | SRSGTDFTLTISSLQPEDFATYYCQQHYTTPPTFGQGTKVEIK |
| Trastuzumab | 307 | DIQMTQSPSSLSASVGDRVTITCRASQDVNTAVAWYQQKPG |
| F9G variable | | KAPKLLIYSASFLYSGVPSRFSGSRSGTDFTLTISSLQPEDFAT |
| Heavy chain | | YYCQQHYTTPPTFGQGTKVEIK |
| Trastuzumab | 308 | EVQLVESGGGLVQPGGSLRLSCAASGFNIKDTYIHWVRQAP |
| F9G variable | | GKGLEWVARIYPTNGYTRYADSVKGRFTISADTSKNTAYLQ |
| Light chain | | MNSLRAEDTAVYYCSRWGGDGGYAMDYWGQGTLVTVSS |
| pertuzumab | 173 | EVQLVESGGGLVQPGGSLRLSCAASGFTFTDYTMDWVRQA |
| Variable heavy | | PGKGLEWVADVNPNSGGSIYNQRFKGRFTLSVDRSKNTLYL |
| chain | | QMNSLRAEDTAVYYCARNLGPSFYFDYWGQGTLVTVSS |
| pertuzumab | 174 | DIQMTQSPSSLSASVGDRVTITCKASQDVSIGVAWYQQKPG |
| Variable light | | KAPKLLIYSASYRYTGVPSRFSGSGSGTDFTLTISSLQPEDFA |
| chain | | TYYCQQYYIYPYTFGQGTKVEIK |
| pertuzumab scFv | 175 | DIQMTQSPSSLSASVGDRVTITCKASQDVSIGVAWYQQKPG |
| | | KAPKLLIYSASYRYTGVPSRFSGSGSGTDFTLTISSLQPEDFA |
| | | TYYCQQYYIYPYTFGQGTKVEIKGSTSGSGKPGSGEGSTKG |
| | | EVQLVESGGGLVQPGGSLRLSCAASGFTFTDYTMDWVRQA |
| | | PGKGLEWVADVNPNSGGSIYNQRFKGRFTLSVDRSKNTLYL |
| | | QMNSLRAEDTAVYYCARNLGPSFYFDYWGQGTLVTVSS |
| FRP5 variable | 176 | QVQLQQSGPELKKPGETVKISCKASGYPFTNYGMNWVKQA |
| heavy vhain | | PGQGLKWMGWINTSTGESTFADDFKGRFDFSLETSANTAYL |
| | | QINNLKSEDMATYFCARWEVYHGYVPYWGQGTTVTVSS |
| FRP5 variable | 177 | DIQLTQSHKFLSTSVGDRVSITCKASQDVYNAVAWYQQKPG |
| light vhain | | QSPKLLIYSASSRYTGVPSRFTGSGSGPDFTFTISSVQAEDLA |
| | | VYFCQQHFRTPFTFGSGTKLEIK |
| A21 variable | 178 | EVQLQQSGPEVVKTGASVKISCKASGYSFTGYFINWVKKNS |
| heavy vhain | | GKSPEWIGHISSSYATSTYNQKFKNKAAFTVDTSSSTAFMQL |
| | | NSLTSEDSAVYYCVRSGNYEEYAMDYWGQGTSVTVSS |
| A21 variable | 179 | DIVLTQTPSSLPVSVGEKVTMTCKSSQTLLYSNNQKNYLAW |
| light vhain | | YQQKPGQSPKLLISWAFTRKSGVPDRFTGSGSGTDFTLTIGS |
| | | VKAEDLAVYYCQQYSNYPWTFGGGTKLEIK |
| XMT1517 | 180 | QVQLVESGGGVVQPGRSLRLSCAASGFTFSSYGMHWVRQA |
| variable heavy | | PGKGLEWVAVIWYDGSNKYYADSVKGRFTISRDNSKNTLY |
| vhain | | LQMNSLRAEDTAVYYCAKEAPYYAKDYMDVWGKGTTVT |
| | | VSS |
| XMT1517 | 181 | EIVLTQSPGTLSLSPGERATLSCRASQSVSSDYLAWYQQKPG |
| variable light | | QAPRLLIYGASSRATGIPDRESGSGSGTDFTLTISRLEPEDFA |
| vhain | | VYYCQQYVSYWTFGGGTKVEIK |
| XMT1518 | 182 | QVQLVESGGGVVQPGRSLRLSCAASGFTFSSYGMHWVRQA |
| variable heavy | | PGKGLEWVAGIWWDGSNEKYADSVKGRFTISRDNSKNTLY |
| vhain | | LQMNSLRAEDTAVYYCAKEAPYYAKDYMDVWGKGTTVT |
| | | VSS |
| XMT1518 | 183 | EIVLTQSPGTLSLSPGERATLSCRASQSVSSDYLAWYQQKPG |
| variable light | | QAPRLLIYGASRRATGIPDRESGSGSGTDFTLTISRLEPEDFA |
| vhain | | VYYCQQYVSYWTFGGGTKVEIK |
| XMT1519 | 184 | EVQLVESGGGLVQPGGSLRLSCAASGFTFSSYSMNWVRQA |
| variable heavy | | PGKGLEWVSYISSSSSTIYYADSVKGRFTISRDNAKNSLYLQ |
| vhain | | MNSLRAEDTAVYYCARGGHGYFDLWGRGTLVTVSS |
| XMT1519 | 185 | EIVLTQSPGTLSLSPGERATLSCRASQSVSSSYLAWYQQKPG |
| variable light | | QAPRLLIYGASSRATGIPDRFSGSGSGTDFTLTISRLEPEDFA |
| vhain | | VYYCQQYHHSPLTFGGGTKVEIK |
| FWP51 variable | 186 | QVQLQQSGAELVRPGTSVKLSCKASDYTFTSYWMNWVKQ |
| heavy vhain | | RPGQGLEWIGMIDPSDSETQYNQMFKDKAALTVDKSSNTA |
| | | YMQLSSLTSEDSAVYYCAKGGASGDWYFDVWGQGTTVT |
| FWP51 variable | 187 | DIQLTQSPSSLSASLGGEVTITCKASQDIKKYIAWYQHKPGK |
| light vhain | | SPRLLIHYTSVLQPGIPSRESGSGSGRDYSFSIHNLEPEDIATY |
| | | YCLHYDYLYTFGGGTKLEI |
| FWP51 VL VH | 188 | MLLLVTSLLLCELPHPAFLLIPDYKDDDDKQVQLQQSGAEL |
| | | VRPGTSVKLSCKASDYTFTSYWMNWVKQRPGQGLEWIGMI |
| | | DPSDSETQYNQMFKDKAALTVDKSSNTAYMQLSSLTSEDS |
| | | AVYYCAKGGASGDWYFDVWGQGTTVTGSTSGSGKPGSGE |
| | | GSTKGDIQLTQSPSSLSASLGGEVTITCKASQDIKKYIAWYQ |
| | | HKPGKSPRLLIHYTSVLQPGIPSRFSGSGSGRDYSFSIHNLEPE |
| | | DIATYYCLHYDYLYTFGGGTKLEI |
| Anti HER2 VHH | 309 | QVQLVQSGGGLVQAGGSLRLSCAASGRTESSYAMAWFRQA |
| | | PGKEREFVAAISWSGANIYVADSVKGRFTISRDNAKDTVYL |
| | | QMNSLKPEDTAVYYCAVKLGFAPVEERQYDYWGQGTQVT |
| | | VSS |

[0365] In some embodiments, the scFv targets EGFR. In some embodiments, the EGFR scFv is based on the Vh and Vl from cetuximab, panitumumab, Imgatuzumab, Nimotuzumab, Necitumumab, ICR62, Matuzumab, C10, Zalutumumab, P1X, P2X, P3X, or EGFR-1a1-VHH. In some embodiments, the EGFR scFv is based on the Vh and Vl from cetuximab. In some embodiments, the EGFR scFv is based on the Vh and Vl from panitumumab. In some embodiments, the EGFR scFv is based on the Vh and Vl from Imgatuzumab. In some embodiments, the EGFR scFv is based on the Vh and Vl from Nimotuzumab. In some embodiments, the EGFR scFv is based on the Vh and Vl from Nimotuzumab (K5). In some embodiments, the EGFR scFv is based on the Vh and VI from Necitumumab. In some embodiments, the EGFR scFv is based on the Vh and VI from ICR62. In some embodiments, the EGFR scFv is based on the Vh and Vl from Matuzumab. In some embodiments, the EGFR scFv is based on the Vh and Vl from C10. In some embodiments, the EGFR scFv is based on the Vh and Vl from Zalutumumab. In some embodiments, the EGFR scFv is based on the Vh and Vl from PIX. In some embodiments, the EGFR scFv is based on the Vh and Vl from P2X. In some embodiments, the EGFR scFv is based on the Vh and Vl from P3X. In some embodiments, the EGFR scFv is based on EGFR-1a1-VHH. In some embodiments, the EGFR scFv is based on EGFR-VHH.

TABLE 16
anti-EGFR sequences

| Sequence | SEQ | |
|---|---|---|
| Information | ID NO | Amino acid sequence |
| cetuximab | 189 | QVQLKQSGPGLVQPSQSLSITCTVSGFSLTNYGVHWVRQSPG |
| Variable heavy | | KGLEWLGVIWSGGNTDYNTPFTSRLSINKDNSKSQVFFKMN |
| chain | | SLQSNDTAIYYCARALTYYDYEFAYWGQGTLVTVS |
| cetuximab | 190 | DILLTQSPVILSVSPGERVSFSCRASQSIGTNIHWYQQRTNGSP |
| Variable light | | RLLIKYASESISGIPSRFSGSGSGTDFTLSINSVESEDIADYYCQ |
| chain | | QNNNWPTTFGAGTKLELK |
| cetuximab scFv | 191 | QVQLKQSGPGLVQPSQSLSITCTVSGFSLTNYGVHWVRQSPG |
| (SEQ ID NO:) | | KGLEWLGVIWSGGNTDYNTPFTSRLSINKDNSKSQVFFKMN |
| | | SLQSNDTAIYYCARALTYYDYEFAYWGQGTLVTVSGSTSGS |
| | | GKPGSGEGSTKGDILLTQSPVILSVSPGERVSFSCRASQSIGTN |
| | | IHWYQQRTNGSPRLLIKYASESISGIPSRFSGSGSGTDFTLSINS |
| | | VESEDIADYYCQQNNNWPTTFGAGTKLELK |
| panitumumab | 192 | QVQLQESGPGLVKPSETLSLTCTVSGGSVSSGDYYWTWIRQS |
| Variable heavy | | PGKGLEWIGHIYYSGNTNYNPSLKSRLTISIDTSKTQFSLKLSS |
| chain | | VTAADTAIYYCVRDRVTGAFDIWGQGTMVTVSS |
| panitumumab | 193 | DIQMTQSPSSLSASVGDRVTITCQASQDISNYLNWYQQKPGK |
| Variable light | | APKLLIYDASNLETGVPSRFSGSGSGTDFTFTISSLQPEDIATY |
| chain | | FCQHFDHLPLAFGGGTKVEIK |
| panitumumab | 194 | DIQMTQSPSSLSASVGDRVTITCQASQDISNYLNWYQQKPGK |
| scFv | | APKLLIYDASNLETGVPSRFSGSGSGTDFTFTISSLQPEDIATY |
| | | FCQHFDHLPLAFGGGTKVEIKGSTSGSGKPGSGEGSTKGQVQ |
| | | LQESGPGLVKPSETLSLTCTVSGGSVSSGDYYWTWIRQSPGK |
| | | GLEWIGHIYYSGNTNYNPSLKSRLTISIDTSKTQFSLKLSSVTA |
| | | ADTAIYYCVRDRVTGAFDIWGQGTMVTVSS |
| Imgatuzuma | 195 | QVQLVQSGAEVKKPGSSVKVSCKASGFTFTDYKIHWVRQAP |
| variable heavy | | GQGLEWMGYFNPNSGYSTYAQKFQGRVTITADKSTSTAYM |
| chain | | ELSSLRSEDTAVYYCARLSPGGYYVMDAWGQGTTVTVSS |
| Imgatuzumab | 196 | DIQMTQSPSSLSASVGDRVTITCRASQGINNYLNWYQQKPGK |
| variable light | | APKRLIYNTNNLQTGVPSRFSGSGSGTEFTLTISSLQPEDFATY |
| chain | | YCLQHNSFPTFGQGTKLEIK |
| Nimotuzumab | 197 | QVQLQQSGAEVKKPGSSVKVSCKASGYTFTNYYIYWVRQAP |
| variable heavy | | GQGLEWIGGINPTSGGSNFNEKFKTRVTITVDESTNTAYMEL |
| chain | | SSLRSEDTAFYFCARQGLWFDSDGRGFDFWGQGSTVTVSS |
| Nimotuzumab | 198 | DIQMTQSPSSLSASVGDRVTITCRSSQNIVHSNGNTYLDWYQ |
| variable light | | QTPGKAPKLLIYKVSNRFSGVPSRFSGSGSGTDFTFTISSLQPE |
| chain | | DIATYYCFQYSHVPWTFGQGTKLQIT |
| Nimotuzumab | 310 | DIQMTQSPSSLSASVGDRVTITCRSSQNIVHSNGNTYLDWYQ |
| (K5) variable | | QTPGKAPKLLIYKVSNRFSGVPSRFSGSGSGTDFTFTISSLQPE |
| light chain | | DIATYYCFQYSHVPWTFGQGTKLQIT |
| Nimotuzumab | 311 | QVQLQQSGAEVKKPGSSVKVSCKASGYTFTDYYIYWVRQAP |
| (K5) variable | | GQGLEWIGGINPVTQRPVFNEKFKTRVTITVDESTNTAYMEL |
| Heavy chain | | SSLRSEDTAFYFCARQGLWFDSDGRGFDFWGQGSTVTVSS |
| Necitumumab | 199 | QVQLQESGPGLVKPSQTLSLTCTVSGGSISSGDYYWSWIRQP |
| variable heavy | | PGKGLEWIGYIYYSGSTDYNPSLKSRVTMSVDTSKNQFSLKV |
| chain | | NSVTAADTAVYYCARVSIFGVGTFDYWGQGTLVTVSS |
| Necitumumab | 200 | EIVMTQSPATLSLSPGERATLSCRASQSVSSYLAWYQQKPGQ |
| variable light | | APRLLIYDASNRATGIPARFSGSGSGTDFTLTISSLEPEDFAVY |
| chain | | YCHQYGSTPLTFGGGTKAEIK |
| ICR62 variable | 201 | QVNLLQSGAALVKPGASVKLSCKGSGFTFTDYKIHWVKQSH |
| heavy chain | | GKSLEWIGYFNPNSGYSTYNEKFKSKATLTADKSTDTAYME |
| | | LTSLTSEDSATYYCTRLSPGGYYVMDAWGQGASVTVSS |
| ICR62 variable | 202 | DIQMTQSPSFLSASVGDRVTINCKASQNINNYLNWYQQKLG |
| light chain | | EAPKRLIYNTNNLQTGIPSRFSGSGSGTDYTLTISSLQPEDFAT |
| | | YFCLQHNSFPTFGAGTKLELK |
| ICR62 VL VH | 203 | MLLLVTSLLLCELPHPAFLLIPDIQMTQSPSFLSASVGDRVTIN |
| | | CKASQNINNYLNWYQQKLGEAPKRLIYNTNNLQTGIPSRFSG |
| | | SGSGTDYTLTISSLQPEDFATYFCLQHNSFPTFGAGTKLELKG |
| | | STSGSGKPGSGEGSTKGQVNLLQSGAALVKPGASVKLSCKG |
| | | SGFTFTDYKIHWVKQSHGKSLEWIGYFNPNSGYSTYNEKFKS |
| | | KATLTADKSTDTAYMELTSLTSEDSATYYCTRLSPGGYYVM |
| | | DAWGQGASVTVSS |
| Matuzumab | 204 | QVQLVQSGAEVKKPGASVKVSCKASGYTFTSHWMHWVRQ |
| variable heavy | | APGQGLEWIGEFNPSNGRTNYNEKFKSKATMTVDTSTNTAY |
| chain | | MELSSLRSEDTAVYYCASRDYDYDGRYFDYWGQGTLVTVS |
| | | S |
| Matuzumab | 205 | DIQMTQSPSSLSASVGDRVTITCSASSSVTYMYWYQQKPGK |
| variable light | | APKLLIYDTSNLASGVPSRESGSGSGTDYTFTISSLQPEDIATY |
| chain | | YCQQWSSHIFTFGQGTKVEIK |
| C10 variable | 206 | EVQLVQSGAEVKKPGSSVKVSCKASGGTFSSYAIGWVRQAP |
| heavy chain | | GQGLEWMGGIIPIFGIANYAQKFQGRVTITADESTSSAYMELS |
| | | SLRSEDTAVYYCAREEGPYCSSTSCYAAFDIWGQGTLVTLSS |
| C10 variable | 207 | QSVLTQDPAVSVALGQTVKITCQGDSLRSYFASWYQQKPGQ |
| light chain | | APTLVMYARNDRPAGVPDRESGSKSGTSASLSAISGLQPEDE |
| | | AYYCAAWDDSLNGYLFGAGTKLTVL |
| Zalutumumab | 208 | QVQLVESGGGVVQPGRSLRLSCAASGFTFSTYGMHWVRQA |
| variable heavy | | PGKGLEWVAVIWDDGSYKYYGDSVKGRFTISRDNSKNTLYL |
| chain | | QMNSLRAEDTAVYYCARDGITMVRGVMKDYFDYWGQGTL |
| | | VTVSS |
| Zalutumumab | 209 | AIQLTQSPSSLSASVGDRVTITCRASQDISSALVWYQQKPGK |
| variable light | | APKLLIYDASSLESGVPSRFSGSESGTDFTLTISSLQPEDFATY |
| chain | | YCQQFNSYPLTFGGGTKVEIK |
| P1X variable | 210 | QVQLVQSGAEVKKPGSSVKVSCKASGGTFSSYAISWVRQAP |
| heavy chain | | GQGLEWMGSIIPIFGTVNYAQKFQGRVTITADESTSTAYMEL |
| | | SSLRSEDTAVYYCARDPSVNLYWYFDLWGRGTLVTVSS |
| P1X variable | 211 | DIQMTQSPSTLSASVGDRVTITCRASQSISSWWAWYQQKPG |
| light chain | | KAPKLLIYDASSLESGVPSRFSGSGSGTEFTLTISSLQPDDFAT |
| | | YYCQQYHAHPTTFGGGTKVEIK |
| P2X variable | 212 | QVQLVQSGAEVKKPGSSVKVSCKASGGTFGSYAISWVRQAP |
| heavy chain | | GQGLEWMGSIIPIFGAANPAQKSQGRVTITADESTSTAYMEL |
| | | SSLRSEDTAVYYCAKMGRGKVAFDIWGQGTMVTVSS |
| P2X variable | 213 | DIVMTQSPDSLAVSLGERATINCKSSQSVLYSPNNKNYLAWY |
| light chain | | QQKPGQPPKLLIYWASTRESGVPDRFSGSGSGTDFTLTISSLQ |
| | | AEDVAVYYCQQYYGSPITFGGGTKVEIK |
| P3X variable | 214 | QVQLVQSGAEVKKPGASVKVSCKASGYAFTSYGINWVRQA |
| heavy chain | | PGQGLEWMGWISAYNGNTYYAQKLRGRVTMTTDTSTSTAY |
| | | MELRSLRSDDTAVYYCARDLGGYGSGSVPFDPWGQGTLVT |
| | | VSS |
| P3X variable | 215 | EIVMTQSPATLSVSPGERATLSCRASQSVSSNLAWYQQKPGQ |
| light chain | | APRLLIYGASTRATGIPARFSGSGSGTEFTLTISSLQSEDFAVY |
| | | YCQDYRTWPRRVFGGGTKVEIK |
| EGFR-la1- | 216 | QVQLQESGGGLVQAGGSLLLSCAASGRTFSSYAMGWFRQAP |
| VHH variable | | GKEREFVAAINWSGGSTSYADSVKGRFTISRDNTKNTVYLQ |
| heavy chain | | MNSLKPEDTAAFYCAATYNPYSRDHYFPRMTTEYDYWGQG |
| | | TQVTVSS |
| EGFR-VHH | 312 | EVQQASGGGLVQAGGSLRLSCAASGRTETTSAIAWFRQAPG |
| variable heavy | | KEREFVAQISASGLGINYSGTVKGRFTISRDADKTTVYLQMN |
| chain | | SLTPEDTAVYYCAAGFHYIAAIRRTTDFHFWGPGTLVTVSS |

[0366] In some embodiments, the scFv targets Mesothelin. In some embodiments, the Mesothelin scFv is based on the Vh and VI from Amatuximab, P4, SS1, SD1, SD2, 1H7, or 3C02. In some embodiments, the Mesothelin scFv is based on the Vh and VI from Amatuximab. In some embodiments, the Mesothelin scFv is based on the Vh and VI from P4. In some embodiments, the Mesothelin scFv is based on the Vh and VI from SS1. In some embodiments, the Mesothelin scFv is based on SD1. In some embodiments, the Mesothelin scFv is based on SD2. In some embodiments, the Mesothelin scFv is based on the Vh and VI from 1H7. In some embodiments, the Mesothelin scFv is based on the Vh and VI from 3C02.

TABLE 17
anti-Mesothelin sequences

| Sequence | SEQ | |
|---|---|---|
| Information | ID NO | Amino acid sequence |
| Amatuximab | 217 | QVQLVQSGAEVKKPGASVKVSCKASGYSFTGYTMNWV |
| variable heavy | | RQAPGQGLEWMGLITPYNGASSYNQKFRGKATMTVDTS |
| chain | | TSTVYMELSSLRSEDTAVYYCARGGYDGRGFDYWGQGT |
| | | LVTVSS |
| Amatuximab | 218 | DIQMTQSPSSLSASVGDRVTITCSASSSVSYMHWYQQKS |
| variable light | | GKAPKLLIYDTSKLASGVPSRFSGSGSGTDFTLTISSLQPE |
| chain | | DFATYYCQQWSKHPLTFGQGTKLEIK |
| P4 variable | 219 | QVQLQQSGPGLVTPSQTLSLTCAISGDSVSSNSATWNWIR |
| heavy chain | | QSPSRGLEWLGRTYYRSKWYNDYAVSVKSRMSINPDTS |
| | | KNQFSLQLNSVTPEDTAVYYCARGMMTYYYGMDVWGQ |
| | | GTTVTVSS |
| P4 variable light | 220 | QPVLTQSSSLSASPGASASLTCTLRSGINVGPYRIYWYQQ |
| chain | | KPGSPPQYLLNYKSDSDKQQGSGVPSRFSGSKDASANAG |
| | | VLLISGLRSEDEADYYCMIWHSSAAVFGGGTQLTVL |
| P4 VL VH | 221 | MLLLVTSLLLCELPHPAFLLIPQPVLTQSSSLSASPGASASL |
| | | TCTLRSGINVGPYRIYWYQQKPGSPPQYLLNYKSDSDKQ |
| | | QGSGVPSRFSGSKDASANAGVLLISGLRSEDEADYYCMI |
| | | WHSSAAVFGGGTQLTVLGSTSGSGKPGSGEGSTKGQVQL |
| | | QQSGPGLVTPSQTLSLTCAISGDSVSSNSATWNWIRQSPS |
| | | RGLEWLGRTYYRSKWYNDYAVSVKSRMSINPDTSKNQF |
| | | SLQLNSVTPEDTAVYYCARGMMTYYYGMDVWGQGTTV |
| | | TVSS |
| SS1 variable | 222 | QVQLQQSGPELEKPGASVKISCKASGYSFTGYTMNWVK |
| heavy chain | | QSHGKSLEWIGLITPYNGASSYNQKFRGKATLTVDKSSST |
| | | AYMDLLSLTSEDSAVYFCARGGYDGRGFDYWGSGTPVT |
| | | VSS |
| SS1 variable | 223 | DIELTQSPAIMSASPGEKVTMTCSASSSVSYMHWYQQKS |
| light chain | | GTSPKRWIYDTSKLASGVPGRFSGSGSGNSYSLTISSVEAE |
| | | DDATYYCQQWSKHPLTFGSGTKVEIK |
| SS1 VL VH | 224 | MLLLVTSLLLCELPHPDIELTQSPAIMSASPGEKVTMTCSA |
| | | SSSVSYMHWYQQKSGTSPKRWIYDTSKLASGVPGRESGS |
| | | GSGNSYSLTISSVEAEDDATYYCQQWSKHPLTFGSGTKV |
| | | EIKGSTSGSGKPGSGEGSTKGQVQLQQSGPELEKPGASVK |
| | | ISCKASGYSFTGYTMNWVKQSHGKSLEWIGLITPYNGAS |
| | | SYNQKFRGKATLTVDKSSSTAYMDLLSLTSEDSAVYFCA |
| | | RGGYDGRGFDYWGSGTPVTVSS |
| SD1 VHH | 225 | QVQLVQSGGGLVQPGGSLRLSCAASDFDFAAYEMSWVR |
| | | QSAPGQGLEWVAIISHDGIDKYYTDSVKGRFTISRDNSKN |
| | | TLYLQMNTLRAEDTATYYCLRLGAVGQGTLVTVSSS |
| SD2 VHH | 226 | QVQLVQSGGGLVQPGGSLRLSCAASDFAFDDYEMSWVR |
| | | QAPGKALEWIGDINHSGTTIYNPSLKSRVTISRDNSKNTL |
| | | YLQMNTLRAEDTAIYYCARPHYGDYSDAFDIWGQGTMV |
| | | TVSS |
| 1H7 variable | 227 | EVQLQQSGTVLARPGASVKMSCKASGYSFTNYRMNWV |
| heavy chain | | KQRPGQGLEWIGGIYPGNRDTTYNQKFKDKAKLTAVTSA |
| | | NTAYMELSSLTNEDSAVYYCTRGVIGIYFDYWGQGTTLT |
| | | VSS |
| 1H7 variable | 228 | DIVMTQSPASLAVSLGQRATISCKASQSVDYDGDSYMNW |
| light chain | | YQQKPGQPPKLLIYAASNLESGIPARFSGSGSGTDFTLNIH |
| | | PVEEEDAATYYCQQNNEAPLTFGAGTKLELK |
| 1H7 VL VH | 229 | MLLLVTSLLLCELPHPAFLLIPDIVMTQSPASLAVSLGQRA |
| | | TISCKASQSVDYDGDSYMNWYQQKPGQPPKLLIYAASNL |
| | | ESGIPARFSGSGSGTDFTLNIHPVEEEDAATYYCQQNNEA |
| | | PLTFGAGTKLELKGSTSGSGKPGSGEGSTKGEVQLQQSGT |
| | | VLARPGASVKMSCKASGYSFTNYRMNWVKQRPGQGLE |
| | | WIGGIYPGNRDTTYNQKFKDKAKLTAVTSANTAYMELSS |
| | | LTNEDSAVYYCTRGVIGIYFDYWGQGTTLTVSS |
| 3C02 variable | 230 | QVQLQQSGTVLARPGASVKMSCKASGYSFTNYRMYWV |
| heavy chain | | KQRPGQGLEWIGAIYPGNSDTTYKQKFKGKAKLTAVTSA |
| | | STAYMELSSLTNEDSAVYYCTRGIRGSYFDVWGAGTTVT |
| | | VSS |
| 3C02 variable | 231 | DIVMTQSPASLAVSLGQRATISCKASQSVDYDGDSYMNW |
| light chain | | YQQKPGQPPKLLIYAASNLESGIPARFSGSGSGTDFTLNIH |
| | | PVEEEDAATYYCQQSNEDPYTFGGGTKLEIK |
| 3C02 VL VH | 232 | MLLLVTSLLLCELPHPAFLLIPDIVMTQSPASLAVSLGQRA |
| | | TISCKASQSVDYDGDSYMNWYQQKPGQPPKLLIYAASNL |
| | | ESGIPARFSGSGSGTDFTLNIHPVEEEDAATYYCQQSNEDP |
| | | YTFGGGTKLEIKGSTSGSGKPGSGEGSTKGQVQLQQSGT |
| | | VLARPGASVKMSCKASGYSFTNYRMYWVKQRPGQGLE |
| | | WIGAIYPGNSDTTYKQKFKGKAKLTAVTSASTAYMELSS |
| | | LTNEDSAVYYCTRGIRGSYFDVWGAGTTVTVSS |
| M1 variable | 313 | EIVLTQSPATLSLSPGERATISCRASQSVSSNFAWYQQRPG |
| Ligh Chain | | QAPRLLIYDASNRATGIPPRFSGSGSGTDFTLTISSLEPEDF |
| | | AAYYCHQRSNWLYTFGQGTKVDIK |
| M1 variable | 314 | QVQLQQSGAEVKKPGASVKVSCKASGYTFTGYYMHWV |
| Heavy Chain | | RQAPGQGLEWMGRINPNSGGTNYAQKFQGRVTMTRDTS |
| | | ISTAYMELSRLRSEDTAVYYCARGRYYGMDVWGQGTM |
| | | VTVSS |
| M5 Variable | 315 | DIVMTQSPSSLSASVGDRVTITCRASQSIRYYLSWYQQKP |
| Light chain | | GKAPKLLIYTASILQNGVPSRESGSGSGTDFTLTISSLQPED |
| | | FATYYCLQTYTTPDFGPGTKVEIK |
| M5 Variable | 316 | QVQLVQSGAEVEKPGASVKVSCKASGYTFTDYYMHWV |
| Heavy chain | | RQAPGQGLEWMGWINPNSGGTNYAQKFQGRVTMTRDT |
| | | SISTAYMELSRLRSDDTAVYYCASGWDFDYWGQGTLVT |
| | | VSS |
| VD9.V3 | 317 | DIQMTQSPSSLSASVGDRVTITCKSSQSVLYSSNQKNYLA |
| Variable light | | WFQQKPGKAPKLLIYWASTRESGVPSRFSGSGSGTDFTLT |
| chain | | ISSLQPEDFATYFCHQYLSSYTFGQGTKVEIK |
| VD9.V3 | 318 | EVQLVESGGGLVQPGGSLRLSCAASGYTFTTYWMHWVR |
| Variable Heavy | | QAPGKGLEWVGYIRPSTGYTEYNQKFKDRFTISADTSKN |
| chain | | TAYLQMNSLRAEDTAVYYCARSRWLLDYWGQGTLVTV |
| | | SS |

[0367] In some embodiments, the orientation of the aCAR VH and VL regions is VH-VL. In some embodiments, the orientation of the aCAR VH and VL regions is VL-VH.

[0368] In some embodiments, the aCAR scFv comprises a linker that covalently connects the VH and the VL to form the aCAR scFv. In some embodiments, the aCAR comprises a GS based linker sequence, connecting the VH and VL to form the scFv. In some embodiments, the GS linker comprises GGGGS (SEQ ID NO:81). In some embodiments, the aCAR comprises a Whitlow linker sequence, e.g., GSTSGSGKPGSGEGSTKG (SEQ ID NO:82).

[0369] 10. aCAR Portion: Hinge and Transmembrane Domain

[0370] In some embodiments, the bicistronic construct comprises an aCAR portion comprising a hinge transmembrane (TM) domain component. In some embodiments, the aCAR portion comprises a hinge TM domain. In some embodiments, the hinge TM domain comprises a hinge TM domain selected from the group consisting of a CD28 hinge TM domain and a CD8 hinge TM domain (including a CD8a hinge TM domain). In some embodiments, the hinge TM domain is a CD28 hinge TM domain. In some embodiments, the vector comprises a CD8 hinge TM domain. In some embodiments, the vector comprises a CD8a hinge TM domain. In some embodiments, the hinge domain comprises a hinge domain selected from the group consisting of a CD28 hinge domain and a CD8 hinge domain (including a CD8a hinge domain). In some embodiments, the hinge domain is a CD28 hinge domain. In some embodiments, the vector comprises a CD8 hinge domain. In some embodiments, the vector comprises a CD8a hinge domain. In some embodiments, the TM domain comprises a TM domain selected from the group consisting of a CD28 TM domain and a CD8 TM domain (including a CD8a TM domain). In some embodiments, the TM domain is a CD28 TM domain. In some embodiments, the vector comprises a CD8 TM domain. In some embodiments, the vector comprises a CD8a TM domain. In some embodiments, the hinge domain is a CD28 hinge domain of SEQ ID NO:85. In some embodiments, the vector comprises a CD8a hinge domain of SEQ ID NO:84. In some embodiments, the TM domain is a CD28 TM domain of SEQ ID NO:319. In some embodiments, the vector comprises a CD8a TM domain of SEQ ID NO:320.

TABLE 18
aCAR hinge and TM domain sequences

| Sequence | SEQ ID | |
|---|---|---|
| Information | NO | Amino acid sequence |
| CD28 hinge | 85 | IEVMYPPPYLDNEKSNGTIIHVKGKHLCPSP |
| | | LFPGPSKP |
| CD28 TM | 319 | FWVLVVVGGVLACYSLLVTVAFIIFWV |
| CD8alpha hinge | 84 | TTTPAPRPPTPAPTIASQPLSLRPEACRPAAG |
| | | GAVHTRGLDFACD |
| CD8alpha TM | 320 | IYIWAPLAGTCGVLLLSLVITLYC |

[0371] 11. aCAR Portion: Co-Stimulatory and Activation Signaling Domain

[0372] In some embodiments, the bicistronic construct comprises an aCAR portion comprising co-stimulatory domain component. In some embodiments, the aCAR portion comprises a co-stimulatory domain. In some embodiments, the co-stimulatory domain is selected from the group consisting of CD137 (4-1BB) or CD28 or both 4-1BB and CD28 (28BB). In some embodiments, the co-stimulatory domain is a CD137 (4-1BB) co-stimulatory domain. In some embodiments, the co-stimulatory domain is a CD28 co-stimulatory domain. In some embodiments, the activation signaling domain is CD3z domain. In some embodiments, the co-stimulatory domain is a 28BB co-stimulatory domain. In some embodiments, the co-stimulatory domain is 4-1BB (SEQ ID NO:233). In some embodiments, the co-stimulatory domain is CD28 (SEQ ID NO:234). In some embodiments, the activation signaling domain is CD3z (SEQ ID NO:235).

TABLE 19
aCAR co-stimulatory and activation signaling domain sequences

| Sequence | SEQ | |
|---|---|---|
| Information | ID NO | Amino acid sequence |
| 4-1BB costim | 233 | KRGRKKLLYIFKQPFMRPVQTTQEEDGCSCRFPEEEEG |
| | | GCEL |
| CD28 costim | 234 | RSKRSRLLHSDYMNMTPRRPGPTRKHYQPYAPPRDFA |
| | | AY |
| CD3z activation | 235 | RVKFSRSADAPAYQQGQNQLYNELNLGRREEYDVLD |
| signaling | | KRRGRDPEMGGKPRRKNPQEGLYNELQKDKMAEAYS |
| | | EIGMKGERRRGKGHDGLYQGLSTATKDTYDALHMQA |
| | | LPPR |

[0373] 12. aCAR Portion: Immunoreceptor Tyrosine-Based Activation Motif (ITAM)

[0374] In some embodiments, the aCAR portion comprises an Immunoreceptor Tyrosine-Based Activation Motif (ITAM). In some embodiments, the ITAM is a CD3 zeta domain. In some embodiments, the ITAM is a CD3 zeta domain of SEQ ID NO:236. In some embodiments, the ITAM is a CD3 zeta 3F domain of SEQ ID NO:237. In some embodiments, the ITAM is a CD3 zeta 4F domain of SEQ ID NO:238. In some embodiments, the ITAM is a CD3 zeta 40F domain of SEQ ID NO:239.

TABLE 20
aCAR ITAM domain sequences

| Sequence | SEQ | |
|---|---|---|
| Information | ID NO | Amino acid sequence |
| CD3 zeta domain | 236 | RVKFSRSADAPAYQQGQNQLYNELNLGRREEYDVLD |
| | | KRRGRDPEMGGKPRRKNPQEGLYNELQKDKMAEAY |
| | | SEIGMKGERRRGKGHDGLYQGLSTATKDTYDALHMQ |
| | | ALPPR |
| CD3 Zeta 3F | 237 | RVKFSRSADAPAYQQGQNQLFNELNLGRREEYDVLD |
| | | KRRGRDPEMGGKPRRKNPQEGLYNELQKDKMAEAFS |
| | | EIGMKGERRRGKGHDGLFQGLSTATKDTYDALHMQA |
| | | LPPR |
| CD3 Zeta 4F | 238 | RVKFSRSADAPAYQQGQNQLFNELNLGRREEFDVLD |
| | | KRRGRDPEMGGKPRRKNPQEGLYNELQKDKMAEAFS |
| | | EIGMKGERRRGKGHDGLFQGLSTATKDTYDALHMQA |
| | | LPPR |
| CD3 Zeta 4OF | 239 | RVKFSRSADAPAYQQGQNQLFNELNLGRREEFDVLD |
| | | KRRGRDPEMGGKPRRKNPQEGLFNELQKDKMAEAYS |
| | | EIGMKGERRRGKGHDGLYQGLSTATKDTFDALHMQA |
| | | LPPR |

[0375] 13. Exemplary aCARs

[0376] In some embodiments, the aCAR comprises an scFv component comprising the VL and VH sequences of trastuzumab (SEQ ID NOs: 170 and 171). In some embodiments, the orientation of the aCAR VH and VL regions is VH-VL. In some embodiments, the orientation of the aCAR VH and VL regions is VL-VH. In some embodiments, the aCAR scFv comprises a (G4S)X3 linker (SEQ ID NO:81) linker that covalently connects the VH and the VL to form the aCAR scFv. In some embodiments, the aCAR scFv comprises a Whitlow linker (SEQ ID NO:82) linker that covalently connects the VH and the VL to form the aCAR scFv. In some embodiments, the aCAR comprises a CD8 alpha hinge TM domain (SEQ ID NO:84). In some embodiments, the aCAR comprises a CD28 hinge TM domain (SEQ ID NO:85). In some embodiments, the aCAR comprises a 4-1BB costimulatory domain (SEQ ID NO: 233). In some embodiments, the aCAR comprises a CD28 costimulatory domain (SEQ ID NO: 234). In some embodiments, the aCAR comprises a CD3z activation signaling domain (SEQ ID NO: 235). In some embodiments, the aCAR comprises an ITAM comprising a CD3 zeta domain (SEQ ID NO: 236). In some embodiments, the aCAR comprises an ITAM comprising a CD3 zeta 3F domain (SEQ ID NO: 237). In some embodiments, the aCAR comprises an ITAM comprising a CD3 zeta 4F domain (SEQ ID NO: 238). In some embodiments, the aCAR comprises an ITAM comprising a CD3 zeta 40F domain (SEQ ID NO: 239). In some embodiments, the aCAR comprises a signal peptide upstream of the aCAR portion, wherein the signal peptide is a CD8 alpha signal peptide (SEQ ID NO: 161), a GM-CSF signal peptide (SEQ ID NO: 162), or a mIgK signal peptide (SEQ ID NO: 306).

[0377] In some embodiments, the aCAR comprises an scFv component comprising the VL and VH sequences of trastuzumab F9G (SEQ ID NOs: 307 and 308). In some embodiments, the orientation of the aCAR VH and VL regions is VH-VL. In some embodiments, the orientation of the aCAR VH and VL regions is VL-VH. In some embodiments, the aCAR scFv comprises a (G4S)X3 linker (SEQ ID NO:81) linker that covalently connects the VH and the VL to form the aCAR scFv. In some embodiments, the aCAR scFv comprises a Whitlow linker (SEQ ID NO:82) linker that covalently connects the VH and the VL to form the aCAR scFv. In some embodiments, the aCAR comprises a CD8 alpha hinge TM domain (SEQ ID NO:84). In some embodiments, the aCAR comprises a CD28 hinge TM domain (SEQ ID NO:85). In some embodiments, the aCAR comprises a 4-1BB costimulatory domain (SEQ ID NO: 233). In some embodiments, the aCAR comprises a CD28 costimulatory domain (SEQ ID NO: 234). In some embodiments, the aCAR comprises a CD3z activation signaling domain (SEQ ID NO: 235). In some embodiments, the aCAR comprises an ITAM comprising a CD3 zeta domain (SEQ ID NO: 236). In some embodiments, the aCAR comprises an ITAM comprising a CD3 zeta 3F domain (SEQ ID NO: 237). In some embodiments, the aCAR comprises an ITAM comprising a CD3 zeta 4F domain (SEQ ID NO: 238). In some embodiments, the aCAR comprises an ITAM comprising a CD3 zeta 40F domain (SEQ ID NO: 239). In some embodiments, the aCAR comprises a signal peptide upstream of the aCAR portion, wherein the signal peptide is a CD8 alpha signal peptide (SEQ ID NO: 161), a GM-CSF signal peptide (SEQ ID NO: 162), or a mIgK signal peptide (SEQ ID NO: 306).

[0378] In some embodiments, the aCAR comprises an scFv component comprising the VL and VH sequences of pertuzumab (SEQ ID NOs: 173 and 174). In some embodiments, the orientation of the aCAR VH and VL regions is VH-VL. In some embodiments, the orientation of the aCAR VH and VL regions is VL-VH. In some embodiments, the aCAR scFv comprises a (G4S)X3 linker (SEQ ID NO:81) linker that covalently connects the VH and the VL to form the aCAR scFv. In some embodiments, the aCAR scFv comprises a Whitlow linker (SEQ ID NO:82) linker that covalently connects the VH and the VL to form the aCAR scFv. In some embodiments, the aCAR comprises a CD8 alpha hinge TM domain (SEQ ID NO:84). In some embodiments, the aCAR comprises a CD28 hinge TM domain (SEQ ID NO:85). In some embodiments, the aCAR comprises a 4-1BB costimulatory domain (SEQ ID NO: 233). In some embodiments, the aCAR comprises a CD28 costimulatory domain (SEQ ID NO: 234). In some embodiments, the aCAR comprises a CD3z costimulatory domain (SEQ ID NO: 235). In some embodiments, the aCAR comprises an ITAM comprising a CD3 zeta domain (SEQ ID NO: 236). In some embodiments, the aCAR comprises an ITAM comprising a CD3 zeta 3F domain (SEQ ID NO: 237). In some embodiments, the aCAR comprises an ITAM comprising a CD3 zeta 4F domain (SEQ ID NO: 238). In some embodiments, the aCAR comprises an ITAM comprising a CD3 zeta 40F domain (SEQ ID NO: 239). In some embodiments, the aCAR comprises a signal peptide upstream of the aCAR portion, wherein the signal peptide is a CD8 alpha signal peptide (SEQ ID NO: 161), a GM-CSF signal peptide (SEQ ID NO: 162), or a mIgK signal peptide (SEQ ID NO: 306).

[0379] In some embodiments, the aCAR comprises an scFv component comprising the VL and VH sequences of FRP5 (SEQ ID NOs: 176 and 177). In some embodiments, the orientation of the aCAR VH and VL regions is VH-VL. In some embodiments, the orientation of the aCAR VH and VL regions is VL-VH. In some embodiments, the aCAR scFv comprises a (G4S)X3 linker (SEQ ID NO:81) linker that covalently connects the VH and the VL to form the aCAR scFv. In some embodiments, the aCAR scFv comprises a Whitlow linker (SEQ ID NO:82) linker that covalently connects the VH and the VL to form the aCAR scFv. In some embodiments, the aCAR comprises a CD8 alpha hinge TM domain (SEQ ID NO:84). In some embodiments, the aCAR comprises a CD28 hinge TM domain (SEQ ID NO:85). In some embodiments, the aCAR comprises a 4-1BB costimulatory domain (SEQ ID NO: 233). In some embodiments, the aCAR comprises a CD28 costimulatory domain (SEQ ID NO: 234). In some embodiments, the aCAR comprises a CD3z costimulatory domain (SEQ ID NO: 235). In some embodiments, the aCAR comprises an ITAM comprising a CD3 zeta domain (SEQ ID NO: 236). In some embodiments, the aCAR comprises an ITAM comprising a CD3 zeta 3F domain (SEQ ID NO: 237). In some embodiments, the aCAR comprises an ITAM comprising a CD3 zeta 4F domain (SEQ ID NO: 238). In some embodiments, the aCAR comprises an ITAM comprising a CD3 zeta 40F domain (SEQ ID NO: 239). In some embodiments, the aCAR comprises a signal peptide upstream of the aCAR portion, wherein the signal peptide is a CD8 alpha signal peptide (SEQ ID NO: 161), a GM-CSF signal peptide (SEQ ID NO: 162), or a mIgK signal peptide (SEQ ID NO: 306).

[0380] In some embodiments, the aCAR comprises an scFv component comprising the VL and VH sequences of A21 (SEQ ID NOs: 178 and 179). In some embodiments, the orientation of the aCAR VH and VL regions is VH-VL. In some embodiments, the orientation of the aCAR VH and VL regions is VL-VH. In some embodiments, the aCAR scFv comprises a (G4S)X3 linker (SEQ ID NO:81) linker that covalently connects the VH and the VL to form the aCAR scFv. In some embodiments, the aCAR scFv comprises a Whitlow linker (SEQ ID NO:82) linker that covalently connects the VH and the VL to form the aCAR scFv. In some embodiments, the aCAR comprises a CD8 alpha hinge TM domain (SEQ ID NO:84). In some embodiments, the aCAR comprises a CD28 hinge TM domain (SEQ ID NO:85). In some embodiments, the aCAR comprises a 4-1BB costimulatory domain (SEQ ID NO: 233). In some embodiments, the aCAR comprises a CD28 costimulatory domain (SEQ ID NO: 234). In some embodiments, the aCAR comprises a CD3z costimulatory domain (SEQ ID NO: 235). In some embodiments, the aCAR comprises an ITAM comprising a CD3 zeta domain (SEQ ID NO: 236). In some embodiments, the aCAR comprises an ITAM comprising a CD3 zeta 3F domain (SEQ ID NO: 237). In some embodiments, the aCAR comprises an ITAM comprising a CD3 zeta 4F domain (SEQ ID NO: 238). In some embodiments, the aCAR comprises an ITAM comprising a CD3 zeta 40F domain (SEQ ID NO: 239). In some embodiments, the aCAR comprises a signal peptide upstream of the aCAR portion, wherein the signal peptide is a CD8 alpha signal peptide (SEQ ID NO: 161), a GM-CSF signal peptide (SEQ ID NO: 162), or a mIgK signal peptide (SEQ ID NO: 306).

[0381] In some embodiments, the aCAR comprises an scFv component comprising the VL and VH sequences of XMT1517 (SEQ ID NOs: 180 and 181). In some embodiments, the orientation of the aCAR VH and VL regions is VH-VL. In some embodiments, the orientation of the aCAR VH and VL regions is VL-VH. In some embodiments, the aCAR scFv comprises a (G4S)X3 linker (SEQ ID NO:81) linker that covalently connects the VH and the VL to form the aCAR scFv. In some embodiments, the aCAR scFv comprises a Whitlow linker (SEQ ID NO:82) linker that covalently connects the VH and the VL to form the aCAR scFv. In some embodiments, the aCAR comprises a CD8 alpha hinge TM domain (SEQ ID NO:84). In some embodiments, the aCAR comprises a CD28 hinge TM domain (SEQ ID NO:85). In some embodiments, the aCAR comprises a 4-1BB costimulatory domain (SEQ ID NO: 233). In some embodiments, the aCAR comprises a CD28 costimulatory domain (SEQ ID NO: 234). In some embodiments, the aCAR comprises a CD3z costimulatory domain (SEQ ID NO: 235). In some embodiments, the aCAR comprises an ITAM comprising a CD3 zeta domain (SEQ ID NO: 236). In some embodiments, the aCAR comprises an ITAM comprising a CD3 zeta 3F domain (SEQ ID NO: 237). In some embodiments, the aCAR comprises an ITAM comprising a CD3 zeta 4F domain (SEQ ID NO: 238). In some embodiments, the aCAR comprises an ITAM comprising a CD3 zeta 40F domain (SEQ ID NO: 239). In some embodiments, the aCAR comprises a signal peptide upstream of the aCAR portion, wherein the signal peptide is a CD8 alpha signal peptide (SEQ ID NO: 161), a GM-CSF signal peptide (SEQ ID NO: 162), or a mIgK signal peptide (SEQ ID NO: 306).

[0382] In some embodiments, the aCAR comprises an scFv component comprising the VL and VH sequences of XMT1518 (SEQ ID NOs: 182 and 183). In some embodiments, the orientation of the aCAR VH and VL regions is VH-VL. In some embodiments, the orientation of the aCAR VH and VL regions is VL-VH. In some embodiments, the aCAR scFv comprises a (G4S)X3 linker (SEQ ID NO:81) linker that covalently connects the VH and the VL to form the aCAR scFv. In some embodiments, the aCAR scFv comprises a Whitlow linker (SEQ ID NO:82) linker that covalently connects the VH and the VL to form the aCAR scFv. In some embodiments, the aCAR comprises a CD8 alpha hinge TM domain (SEQ ID NO:84). In some embodiments, the aCAR comprises a CD28 hinge TM domain (SEQ ID NO:85). In some embodiments, the aCAR comprises a 4-1BB costimulatory domain (SEQ ID NO: 233). In some embodiments, the aCAR comprises a CD28 costimulatory domain (SEQ ID NO: 234). In some embodiments, the aCAR comprises a CD3z costimulatory domain (SEQ ID NO: 235). In some embodiments, the aCAR comprises an ITAM comprising a CD3 zeta domain (SEQ ID NO: 236). In some embodiments, the aCAR comprises an ITAM comprising a CD3 zeta 3F domain (SEQ ID NO: 237). In some embodiments, the aCAR comprises an ITAM comprising a CD3 zeta 4F domain (SEQ ID NO: 238). In some embodiments, the aCAR comprises an ITAM comprising a CD3 zeta 40F domain (SEQ ID NO: 239). In some embodiments, the aCAR comprises a signal peptide upstream of the aCAR portion, wherein the signal peptide is a CD8 alpha signal peptide (SEQ ID NO: 161), a GM-CSF signal peptide (SEQ ID NO: 162), or a mIgK signal peptide (SEQ ID NO: 306).

[0383] In some embodiments, the aCAR comprises an scFv component comprising the VL and VH sequences of XMT1519 (SEQ ID NOs: 184 and 185). In some embodiments, the orientation of the aCAR VH and VL regions is VH-VL. In some embodiments, the orientation of the aCAR VH and VL regions is VL-VH. In some embodiments, the aCAR scFv comprises a (G4S)X3 linker (SEQ ID NO:81) linker that covalently connects the VH and the VL to form the aCAR scFv. In some embodiments, the aCAR scFv comprises a Whitlow linker (SEQ ID NO:82) linker that covalently connects the VH and the VL to form the aCAR scFv. In some embodiments, the aCAR comprises a CD8 alpha hinge TM domain (SEQ ID NO:84). In some embodiments, the aCAR comprises a CD28 hinge TM domain (SEQ ID NO:85). In some embodiments, the aCAR comprises a 4-1BB costimulatory domain (SEQ ID NO: 233). In some embodiments, the aCAR comprises a CD28 costimulatory domain (SEQ ID NO: 234). In some embodiments, the aCAR comprises a CD3z costimulatory domain (SEQ ID NO: 235). In some embodiments, the aCAR comprises an ITAM comprising a CD3 zeta domain (SEQ ID NO: 236). In some embodiments, the aCAR comprises an ITAM comprising a CD3 zeta 3F domain (SEQ ID NO: 237). In some embodiments, the aCAR comprises an ITAM comprising a CD3 zeta 4F domain (SEQ ID NO: 238). In some embodiments, the aCAR comprises an ITAM comprising a CD3 zeta 40F domain (SEQ ID NO: 239). In some embodiments, the aCAR comprises a signal peptide upstream of the aCAR portion, wherein the signal peptide is a CD8 alpha signal peptide (SEQ ID NO: 161), a GM-CSF signal peptide (SEQ ID NO: 162), or a mIgK signal peptide (SEQ ID NO: 306).

[0384] In some embodiments, the aCAR comprises an scFv component comprising the VL and VH sequences of FWP51 (SEQ ID NOs: 186 and 187). In some embodiments, the orientation of the aCAR VH and VL regions is VH-VL. In some embodiments, the orientation of the aCAR VH and VL regions is VL-VH. In some embodiments, the aCAR scFv comprises a (G4S)X3 linker (SEQ ID NO:81) linker that covalently connects the VH and the VL to form the aCAR scFv. In some embodiments, the aCAR scFv comprises a Whitlow linker (SEQ ID NO:82) linker that covalently connects the VH and the VL to form the aCAR scFv. In some embodiments, the aCAR comprises a CD8 alpha hinge TM domain (SEQ ID NO:84). In some embodiments, the aCAR comprises a CD28 hinge TM domain (SEQ ID NO:85). In some embodiments, the aCAR comprises a 4-1BB costimulatory domain (SEQ ID NO: 233). In some embodiments, the aCAR comprises a CD28 costimulatory domain (SEQ ID NO: 234). In some embodiments, the aCAR comprises a CD3z costimulatory domain (SEQ ID NO: 235). In some embodiments, the aCAR comprises an ITAM comprising a CD3 zeta domain (SEQ ID NO: 236). In some embodiments, the aCAR comprises an ITAM comprising a CD3 zeta 3F domain (SEQ ID NO: 237). In some embodiments, the aCAR comprises an ITAM comprising a CD3 zeta 4F domain (SEQ ID NO: 238). In some embodiments, the aCAR comprises an ITAM comprising a CD3 zeta 40F domain (SEQ ID NO: 239). In some embodiments, the aCAR comprises a signal peptide upstream of the aCAR portion, wherein the signal peptide is a CD8 alpha signal peptide (SEQ ID NO: 161), a GM-CSF signal peptide (SEQ ID NO: 162), or a mIgK signal peptide (SEQ ID NO: 306).

[0385] In some embodiments, the aCAR comprises an scFv component comprising the anti-HER2 VHH (SEQ ID NO: 309). In some embodiments, the orientation of the aCAR VH and VL regions is VH-VL. In some embodiments, the orientation of the aCAR VH and VL regions is VL-VH. In some embodiments, the aCAR scFv comprises a (G4S)X3 linker (SEQ ID NO:81) linker that covalently connects the VH and the VL to form the aCAR scFv. In some embodiments, the aCAR scFv comprises a Whitlow linker (SEQ ID NO:82) linker that covalently connects the VH and the VL to form the aCAR scFv. In some embodiments, the aCAR comprises a CD8 alpha hinge TM domain (SEQ ID NO:84). In some embodiments, the aCAR comprises a CD28 hinge TM domain (SEQ ID NO:85). In some embodiments, the aCAR comprises a 4-1BB costimulatory domain (SEQ ID NO: 233). In some embodiments, the aCAR comprises a CD28 costimulatory domain (SEQ ID NO: 234). In some embodiments, the aCAR comprises a CD3z costimulatory domain (SEQ ID NO: 235). In some embodiments, the aCAR comprises an ITAM comprising a CD3 zeta domain (SEQ ID NO: 236). In some embodiments, the aCAR comprises an ITAM comprising a CD3 zeta 3F domain (SEQ ID NO: 237). In some embodiments, the aCAR comprises an ITAM comprising a CD3 zeta 4F domain (SEQ ID NO: 238). In some embodiments, the aCAR comprises an ITAM comprising a CD3 zeta 40F domain (SEQ ID NO: 239).

[0386] In some embodiments, the aCAR comprises an scFv component comprising the VL and VH sequences of Cetuximab (SEQ ID NOs: 189 and 190). In some embodiments, the orientation of the aCAR VH and VL regions is VH-VL. In some embodiments, the orientation of the aCAR VH and VL regions is VL-VH. In some embodiments, the aCAR scFv comprises a (G4S)X3 linker (SEQ ID NO:81) linker that covalently connects the VH and the VL to form the aCAR scFv. In some embodiments, the aCAR scFv comprises a Whitlow linker (SEQ ID NO:82) linker that covalently connects the VH and the VL to form the aCAR scFv. In some embodiments, the aCAR comprises a CD8 alpha hinge TM domain (SEQ ID NO:84). In some embodiments, the aCAR comprises a CD28 hinge TM domain (SEQ ID NO:85). In some embodiments, the aCAR comprises a 4-1BB costimulatory domain (SEQ ID NO: 233). In some embodiments, the aCAR comprises a CD28 costimulatory domain (SEQ ID NO: 234). In some embodiments, the aCAR comprises a CD3z costimulatory domain (SEQ ID NO: 235). In some embodiments, the aCAR comprises an ITAM comprising a CD3 zeta domain (SEQ ID NO: 236). In some embodiments, the aCAR comprises an ITAM comprising a CD3 zeta 3F domain (SEQ ID NO: 237). In some embodiments, the aCAR comprises an ITAM comprising a CD3 zeta 4F domain (SEQ ID NO: 238). In some embodiments, the aCAR comprises an ITAM comprising a CD3 zeta 40F domain (SEQ ID NO: 239). In some embodiments, the aCAR comprises a signal peptide upstream of the aCAR portion, wherein the signal peptide is a CD8 alpha signal peptide (SEQ ID NO: 161), a GM-CSF signal peptide (SEQ ID NO: 162), or a mIgK signal peptide (SEQ ID NO: 306).

[0387] In some embodiments, the aCAR comprises an scFv component comprising the VL and VH sequences of Panitumumab (SEQ ID NOs: 192 and 193). In some embodiments, the orientation of the aCAR VH and VL regions is VH-VL. In some embodiments, the orientation of the aCAR VH and VL regions is VL-VH. In some embodiments, the aCAR scFv comprises a (G4S)X3 linker (SEQ ID NO:81) linker that covalently connects the VH and the VL to form the aCAR scFv. In some embodiments, the aCAR scFv comprises a Whitlow linker (SEQ ID NO:82) linker that covalently connects the VH and the VL to form the aCAR scFv. In some embodiments, the aCAR comprises a CD8 alpha hinge TM domain (SEQ ID NO:84). In some embodiments, the aCAR comprises a CD28 hinge TM domain (SEQ ID NO:85). In some embodiments, the aCAR comprises a 4-1BB costimulatory domain (SEQ ID NO: 233). In some embodiments, the aCAR comprises a CD28 costimulatory domain (SEQ ID NO: 234). In some embodiments, the aCAR comprises a CD3z costimulatory domain (SEQ ID NO: 235). In some embodiments, the aCAR comprises an ITAM comprising a CD3 zeta domain (SEQ ID NO: 236). In some embodiments, the aCAR comprises an ITAM comprising a CD3 zeta 3F domain (SEQ ID NO: 237). In some embodiments, the aCAR comprises an ITAM comprising a CD3 zeta 4F domain (SEQ ID NO: 238). In some embodiments, the aCAR comprises an ITAM comprising a CD3 zeta 40F domain (SEQ ID NO: 239). In some embodiments, the aCAR comprises a signal peptide upstream of the aCAR portion, wherein the signal peptide is a CD8 alpha signal peptide (SEQ ID NO: 161), a GM-CSF signal peptide (SEQ ID NO: 162), or a mIgK signal peptide (SEQ ID NO: 306).

[0388] In some embodiments, the aCAR comprises an scFv component comprising the VL and VH sequences of Imgatuzumab (SEQ ID NOs: 195 and 196). In some embodiments, the orientation of the aCAR VH and VL regions is VH-VL. In some embodiments, the orientation of the aCAR VH and VL regions is VL-VH. In some embodiments, the aCAR scFv comprises a (G4S)X3 linker (SEQ ID NO:81) linker that covalently connects the VH and the VL to form the aCAR scFv. In some embodiments, the aCAR scFv comprises a Whitlow linker (SEQ ID NO:82) linker that covalently connects the VH and the VL to form the aCAR scFv. In some embodiments, the aCAR comprises a CD8 alpha hinge TM domain (SEQ ID NO:84). In some embodiments, the aCAR comprises a CD28 hinge TM domain (SEQ ID NO:85). In some embodiments, the aCAR comprises a 4-1BB costimulatory domain (SEQ ID NO: 233). In some embodiments, the aCAR comprises a CD28 costimulatory domain (SEQ ID NO: 234). In some embodiments, the aCAR comprises a CD3z costimulatory domain (SEQ ID NO: 235). In some embodiments, the aCAR comprises an ITAM comprising a CD3 zeta domain (SEQ ID NO: 236). In some embodiments, the aCAR comprises an ITAM comprising a CD3 zeta 3F domain (SEQ ID NO: 237). In some embodiments, the aCAR comprises an ITAM comprising a CD3 zeta 4F domain (SEQ ID NO: 238). In some embodiments, the aCAR comprises an ITAM comprising a CD3 zeta 40F domain (SEQ ID NO: 239). In some embodiments, the aCAR comprises a signal peptide upstream of the aCAR portion, wherein the signal peptide is a CD8 alpha signal peptide (SEQ ID NO: 161), a GM-CSF signal peptide (SEQ ID NO: 162), or a mIgK signal peptide (SEQ ID NO: 306).

[0389] In some embodiments, the aCAR comprises an scFv component comprising the VL and VH sequences of Nimotuzumab (SEQ ID NOs: 197 and 198). In some embodiments, the orientation of the aCAR VH and VL regions is VH-VL. In some embodiments, the orientation of the aCAR VH and VL regions is VL-VH. In some embodiments, the aCAR scFv comprises a (G4S)X3 linker (SEQ ID NO:81) linker that covalently connects the VH and the VL to form the aCAR scFv. In some embodiments, the aCAR scFv comprises a Whitlow linker (SEQ ID NO:82) linker that covalently connects the VH and the VL to form the aCAR scFv. In some embodiments, the aCAR comprises a CD8 alpha hinge TM domain (SEQ ID NO:84). In some embodiments, the aCAR comprises a CD28 hinge TM domain (SEQ ID NO:85). In some embodiments, the aCAR comprises a 4-1BB costimulatory domain (SEQ ID NO: 233). In some embodiments, the aCAR comprises a CD28 costimulatory domain (SEQ ID NO: 234). In some embodiments, the aCAR comprises a CD3z costimulatory domain (SEQ ID NO: 235). In some embodiments, the aCAR comprises an ITAM comprising a CD3 zeta domain (SEQ ID NO: 236). In some embodiments, the aCAR comprises an ITAM comprising a CD3 zeta 3F domain (SEQ ID NO: 237). In some embodiments, the aCAR comprises an ITAM comprising a CD3 zeta 4F domain (SEQ ID NO: 238). In some embodiments, the aCAR comprises an ITAM comprising a CD3 zeta 40F domain (SEQ ID NO: 239). In some embodiments, the aCAR comprises a signal peptide upstream of the aCAR portion, wherein the signal peptide is a CD8 alpha signal peptide (SEQ ID NO: 161), a GM-CSF signal peptide (SEQ ID NO: 162), or a mIgK signal peptide (SEQ ID NO: 306).

[0390] In some embodiments, the aCAR comprises an scFv component comprising the VL and VH sequences of Nimotuzumab (K5) (SEQ ID NOs: 310 and 311). In some embodiments, the orientation of the aCAR VH and VL regions is VH-VL. In some embodiments, the orientation of the aCAR VH and VL regions is VL-VH. In some embodiments, the aCAR scFv comprises a (G4S)X3 linker (SEQ ID NO:81) linker that covalently connects the VH and the VL to form the aCAR scFv. In some embodiments, the aCAR scFv comprises a Whitlow linker (SEQ ID NO:82) linker that covalently connects the VH and the VL to form the aCAR scFv. In some embodiments, the aCAR comprises a CD8 alpha hinge TM domain (SEQ ID NO:84). In some embodiments, the aCAR comprises a CD28 hinge TM domain (SEQ ID NO:85). In some embodiments, the aCAR comprises a 4-1BB costimulatory domain (SEQ ID NO: 233). In some embodiments, the aCAR comprises a CD28 costimulatory domain (SEQ ID NO: 234). In some embodiments, the aCAR comprises a CD3z costimulatory domain (SEQ ID NO: 235). In some embodiments, the aCAR comprises an ITAM comprising a CD3 zeta domain (SEQ ID NO: 236). In some embodiments, the aCAR comprises an ITAM comprising a CD3 zeta 3F domain (SEQ ID NO: 237). In some embodiments, the aCAR comprises an ITAM comprising a CD3 zeta 4F domain (SEQ ID NO: 238). In some embodiments, the aCAR comprises an ITAM comprising a CD3 zeta 40F domain (SEQ ID NO: 239). In some embodiments, the aCAR comprises a signal peptide upstream of the aCAR portion, wherein the signal peptide is a CD8 alpha signal peptide (SEQ ID NO: 161), a GM-CSF signal peptide (SEQ ID NO: 162), or a mIgK signal peptide (SEQ ID NO: 306).

[0391] In some embodiments, the aCAR comprises an scFv component comprising the VL and VH sequences of Necitumumab (SEQ ID NOs: 199 and 200). In some embodiments, the orientation of the aCAR VH and VL regions is VH-VL. In some embodiments, the orientation of the aCAR VH and VL regions is VL-VH. In some embodiments, the aCAR scFv comprises a (G4S)X3 linker (SEQ ID NO:81) linker that covalently connects the VH and the VL to form the aCAR scFv. In some embodiments, the aCAR scFv comprises a Whitlow linker (SEQ ID NO:82) linker that covalently connects the VH and the VL to form the aCAR scFv. In some embodiments, the aCAR comprises a CD8 alpha hinge TM domain (SEQ ID NO:84). In some embodiments, the aCAR comprises a CD28 hinge TM domain (SEQ ID NO:85). In some embodiments, the aCAR comprises a 4-1BB costimulatory domain (SEQ ID NO: 233). In some embodiments, the aCAR comprises a CD28 costimulatory domain (SEQ ID NO: 234). In some embodiments, the aCAR comprises a CD3z costimulatory domain (SEQ ID NO: 235). In some embodiments, the aCAR comprises an ITAM comprising a CD3 zeta domain (SEQ ID NO: 236). In some embodiments, the aCAR comprises an ITAM comprising a CD3 zeta 3F domain (SEQ ID NO: 237). In some embodiments, the aCAR comprises an ITAM comprising a CD3 zeta 4F domain (SEQ ID NO: 238). In some embodiments, the aCAR comprises an ITAM comprising a CD3 zeta 40F domain (SEQ ID NO: 239). In some embodiments, the aCAR comprises a signal peptide upstream of the aCAR portion, wherein the signal peptide is a CD8 alpha signal peptide (SEQ ID NO: 161), a GM-CSF signal peptide (SEQ ID NO: 162), or a mIgK signal peptide (SEQ ID NO: 306).

[0392] In some embodiments, the aCAR comprises an scFv component comprising the VL and VH sequences of ICR62 (SEQ ID NOs: 201 and 202). In some embodiments, the orientation of the aCAR VH and VL regions is VH-VL. In some embodiments, the orientation of the aCAR VH and VL regions is VL-VH. In some embodiments, the aCAR scFv comprises a (G4S)X3 linker (SEQ ID NO:81) linker that covalently connects the VH and the VL to form the aCAR scFv. In some embodiments, the aCAR scFv comprises a Whitlow linker (SEQ ID NO:82) linker that covalently connects the VH and the VL to form the aCAR scFv. In some embodiments, the aCAR comprises a CD8 alpha hinge TM domain (SEQ ID NO:84). In some embodiments, the aCAR comprises a CD28 hinge TM domain (SEQ ID NO:85). In some embodiments, the aCAR comprises a 4-1BB costimulatory domain (SEQ ID NO: 233). In some embodiments, the aCAR comprises a CD28 costimulatory domain (SEQ ID NO: 234). In some embodiments, the aCAR comprises a CD3z costimulatory domain (SEQ ID NO: 235). In some embodiments, the aCAR comprises an ITAM comprising a CD3 zeta domain (SEQ ID NO: 236). In some embodiments, the aCAR comprises an ITAM comprising a CD3 zeta 3F domain (SEQ ID NO: 237). In some embodiments, the aCAR comprises an ITAM comprising a CD3 zeta 4F domain (SEQ ID NO: 238). In some embodiments, the aCAR comprises an ITAM comprising a CD3 zeta 40F domain (SEQ ID NO: 239). In some embodiments, the aCAR comprises a signal peptide upstream of the aCAR portion, wherein the signal peptide is a CD8 alpha signal peptide (SEQ ID NO: 161), a GM-CSF signal peptide (SEQ ID NO: 162), or a mIgK signal peptide (SEQ ID NO: 306).

[0393] In some embodiments, the aCAR comprises an scFv component comprising the VL and VH sequences of Matuzumab (SEQ ID NOs: 204 and 205). In some embodiments, the orientation of the aCAR VH and VL regions is VH-VL. In some embodiments, the orientation of the aCAR VH and VL regions is VL-VH. In some embodiments, the aCAR scFv comprises a (G4S)X3 linker (SEQ ID NO:81) linker that covalently connects the VH and the VL to form the aCAR scFv. In some embodiments, the aCAR scFv comprises a Whitlow linker (SEQ ID NO:82) linker that covalently connects the VH and the VL to form the aCAR scFv. In some embodiments, the aCAR comprises a CD8 alpha hinge TM domain (SEQ ID NO:84). In some embodiments, the aCAR comprises a CD28 hinge TM domain (SEQ ID NO:85). In some embodiments, the aCAR comprises a 4-1BB costimulatory domain (SEQ ID NO: 233). In some embodiments, the aCAR comprises a CD28 costimulatory domain (SEQ ID NO: 234). In some embodiments, the aCAR comprises a CD3z costimulatory domain (SEQ ID NO: 235). In some embodiments, the aCAR comprises an ITAM comprising a CD3 zeta domain (SEQ ID NO: 236). In some embodiments, the aCAR comprises an ITAM comprising a CD3 zeta 3F domain (SEQ ID NO: 237). In some embodiments, the aCAR comprises an ITAM comprising a CD3 zeta 4F domain (SEQ ID NO: 238). In some embodiments, the aCAR comprises an ITAM comprising a CD3 zeta 40F domain (SEQ ID NO: 239). In some embodiments, the aCAR comprises a signal peptide upstream of the aCAR portion, wherein the signal peptide is a CD8 alpha signal peptide (SEQ ID NO: 161), a GM-CSF signal peptide (SEQ ID NO: 162), or a mIgK signal peptide (SEQ ID NO: 306).

[0394] In some embodiments, the aCAR comprises an scFv component comprising the VL and VH sequences of C10 (SEQ ID NOs: 206 and 207). In some embodiments, the orientation of the aCAR VH and VL regions is VH-VL. In some embodiments, the orientation of the aCAR VH and VL regions is VL-VH. In some embodiments, the aCAR scFv comprises a (G4S)X3 linker (SEQ ID NO:81) linker that covalently connects the VH and the VL to form the aCAR scFv. In some embodiments, the aCAR scFv comprises a Whitlow linker (SEQ ID NO:82) linker that covalently connects the VH and the VL to form the aCAR scFv. In some embodiments, the aCAR comprises a CD8 alpha hinge TM domain (SEQ ID NO:84). In some embodiments, the aCAR comprises a CD28 hinge TM domain (SEQ ID NO:85). In some embodiments, the aCAR comprises a 4-1BB costimulatory domain (SEQ ID NO: 233). In some embodiments, the aCAR comprises a CD28 costimulatory domain (SEQ ID NO: 234). In some embodiments, the aCAR comprises a CD3z costimulatory domain (SEQ ID NO: 235). In some embodiments, the aCAR comprises an ITAM comprising a CD3 zeta domain (SEQ ID NO: 236). In some embodiments, the aCAR comprises an ITAM comprising a CD3 zeta 3F domain (SEQ ID NO: 237). In some embodiments, the aCAR comprises an ITAM comprising a CD3 zeta 4F domain (SEQ ID NO: 238). In some embodiments, the aCAR comprises an ITAM comprising a CD3 zeta 40F domain (SEQ ID NO: 239). In some embodiments, the aCAR comprises a signal peptide upstream of the aCAR portion, wherein the signal peptide is a CD8 alpha signal peptide (SEQ ID NO: 161), a GM-CSF signal peptide (SEQ ID NO: 162), or a mIgK signal peptide (SEQ ID NO: 306).

[0395] In some embodiments, the aCAR comprises an scFv component comprising the VL and VH sequences of Zalutumumab (SEQ ID NOs: 208 and 209). In some embodiments, the orientation of the aCAR VH and VL regions is VH-VL. In some embodiments, the orientation of the aCAR VH and VL regions is VL-VH. In some embodiments, the aCAR scFv comprises a (G4S)X3 linker (SEQ ID NO:81) linker that covalently connects the VH and the VL to form the aCAR scFv. In some embodiments, the aCAR scFv comprises a Whitlow linker (SEQ ID NO:82) linker that covalently connects the VH and the VL to form the aCAR scFv. In some embodiments, the aCAR comprises a CD8 alpha hinge TM domain (SEQ ID NO:84). In some embodiments, the aCAR comprises a CD28 hinge TM domain (SEQ ID NO:85). In some embodiments, the aCAR comprises a 4-1BB costimulatory domain (SEQ ID NO: 233). In some embodiments, the aCAR comprises a CD28 costimulatory domain (SEQ ID NO: 234). In some embodiments, the aCAR comprises a CD3z costimulatory domain (SEQ ID NO: 235). In some embodiments, the aCAR comprises an ITAM comprising a CD3 zeta domain (SEQ ID NO: 236). In some embodiments, the aCAR comprises an ITAM comprising a CD3 zeta 3F domain (SEQ ID NO: 237). In some embodiments, the aCAR comprises an ITAM comprising a CD3 zeta 4F domain (SEQ ID NO: 238). In some embodiments, the aCAR comprises an ITAM comprising a CD3 zeta 40F domain (SEQ ID NO: 239). In some embodiments, the aCAR comprises a signal peptide upstream of the aCAR portion, wherein the signal peptide is a CD8 alpha signal peptide (SEQ ID NO: 161), a GM-CSF signal peptide (SEQ ID NO: 162), or a mIgK signal peptide (SEQ ID NO: 306).

[0396] In some embodiments, the aCAR comprises an scFv component comprising the VL and VH sequences of P1X (SEQ ID NOs: 210 and 211). In some embodiments, the orientation of the aCAR VH and VL regions is VH-VL. In some embodiments, the orientation of the aCAR VH and VL regions is VL-VH. In some embodiments, the aCAR scFv comprises a (G4S)X3 linker (SEQ ID NO:81) linker that covalently connects the VH and the VL to form the aCAR scFv. In some embodiments, the aCAR scFv comprises a Whitlow linker (SEQ ID NO:82) linker that covalently connects the VH and the VL to form the aCAR scFv. In some embodiments, the aCAR comprises a CD8 alpha hinge TM domain (SEQ ID NO:84). In some embodiments, the aCAR comprises a CD28 hinge TM domain (SEQ ID NO:85). In some embodiments, the aCAR comprises a 4-1BB costimulatory domain (SEQ ID NO: 233). In some embodiments, the aCAR comprises a CD28 costimulatory domain (SEQ ID NO: 234). In some embodiments, the aCAR comprises a CD3z costimulatory domain (SEQ ID NO: 235). In some embodiments, the aCAR comprises an ITAM comprising a CD3 zeta domain (SEQ ID NO: 236). In some embodiments, the aCAR comprises an ITAM comprising a CD3 zeta 3F domain (SEQ ID NO: 237). In some embodiments, the aCAR comprises an ITAM comprising a CD3 zeta 4F domain (SEQ ID NO: 238). In some embodiments, the aCAR comprises an ITAM comprising a CD3 zeta 40F domain (SEQ ID NO: 239). In some embodiments, the aCAR comprises a signal peptide upstream of the aCAR portion, wherein the signal peptide is a CD8 alpha signal peptide (SEQ ID NO: 161), a GM-CSF signal peptide (SEQ ID NO: 162), or a mIgK signal peptide (SEQ ID NO: 306).

[0397] In some embodiments, the aCAR comprises an scFv component comprising the VL and VH sequences of P2X (SEQ ID NOs: 212 and 213). In some embodiments, the orientation of the aCAR VH and VL regions is VH-VL. In some embodiments, the orientation of the aCAR VH and VL regions is VL-VH. In some embodiments, the aCAR scFv comprises a (G4S)X3 linker (SEQ ID NO:81) linker that covalently connects the VH and the VL to form the aCAR scFv. In some embodiments, the aCAR scFv comprises a Whitlow linker (SEQ ID NO:82) linker that covalently connects the VH and the VL to form the aCAR scFv. In some embodiments, the aCAR comprises a CD8 alpha hinge TM domain (SEQ ID NO:84). In some embodiments, the aCAR comprises a CD28 hinge TM domain (SEQ ID NO:85). In some embodiments, the aCAR comprises a 4-1BB costimulatory domain (SEQ ID NO: 233). In some embodiments, the aCAR comprises a CD28 costimulatory domain (SEQ ID NO: 234). In some embodiments, the aCAR comprises a CD3z costimulatory domain (SEQ ID NO: 235). In some embodiments, the aCAR comprises an ITAM comprising a CD3 zeta domain (SEQ ID NO: 236). In some embodiments, the aCAR comprises an ITAM comprising a CD3 zeta 3F domain (SEQ ID NO: 237). In some embodiments, the aCAR comprises an ITAM comprising a CD3 zeta 4F domain (SEQ ID NO: 238). In some embodiments, the aCAR comprises an ITAM comprising a CD3 zeta 40F domain (SEQ ID NO: 239). In some embodiments, the aCAR comprises a signal peptide upstream of the aCAR portion, wherein the signal peptide is a CD8 alpha signal peptide (SEQ ID NO: 161), a GM-CSF signal peptide (SEQ ID NO: 162), or a mIgK signal peptide (SEQ ID NO: 306).

[0398] In some embodiments, the aCAR comprises an scFv component comprising the VL and VH sequences of P3X (SEQ ID NOs: 214 and 215). In some embodiments, the orientation of the aCAR VH and VL regions is VH-VL. In some embodiments, the orientation of the aCAR VH and VL regions is VL-VH. In some embodiments, the aCAR scFv comprises a (G4S)X3 linker (SEQ ID NO:81) linker that covalently connects the VH and the VL to form the aCAR scFv. In some embodiments, the aCAR scFv comprises a Whitlow linker (SEQ ID NO:82) linker that covalently connects the VH and the VL to form the aCAR scFv. In some embodiments, the aCAR comprises a CD8 alpha hinge TM domain (SEQ ID NO:84). In some embodiments, the aCAR comprises a CD28 hinge TM domain (SEQ ID NO:85). In some embodiments, the aCAR comprises a 4-1BB costimulatory domain (SEQ ID NO: 233). In some embodiments, the aCAR comprises a CD28 costimulatory domain (SEQ ID NO: 234). In some embodiments, the aCAR comprises a CD3z costimulatory domain (SEQ ID NO: 235). In some embodiments, the aCAR comprises an ITAM comprising a CD3 zeta domain (SEQ ID NO: 236). In some embodiments, the aCAR comprises an ITAM comprising a CD3 zeta 3F domain (SEQ ID NO: 237). In some embodiments, the aCAR comprises an ITAM comprising a CD3 zeta 4F domain (SEQ ID NO: 238). In some embodiments, the aCAR comprises an ITAM comprising a CD3 zeta 40F domain (SEQ ID NO: 239). In some embodiments, the aCAR comprises a signal peptide upstream of the aCAR portion, wherein the signal peptide is a CD8 alpha signal peptide (SEQ ID NO: 161), a GM-CSF signal peptide (SEQ ID NO: 162), or a mIgK signal peptide (SEQ ID NO: 306).

[0399] In some embodiments, the aCAR comprises an scFv component comprising the VHH sequence of EGFR-1a1-VHH (SEQ ID NO: 216). In some embodiments, the orientation of the aCAR VH and VL regions is VH-VL. In some embodiments, the orientation of the aCAR VH and VL regions is VL-VH. In some embodiments, the aCAR scFv comprises a (G4S)X3 linker (SEQ ID NO:81) linker that covalently connects the VH and the VL to form the aCAR scFv. In some embodiments, the aCAR scFv comprises a Whitlow linker (SEQ ID NO:82) linker that covalently connects the VH and the VL to form the aCAR scFv. In some embodiments, the aCAR comprises a CD8 alpha hinge TM domain (SEQ ID NO:84). In some embodiments, the aCAR comprises a CD28 hinge TM domain (SEQ ID NO:85). In some embodiments, the aCAR comprises a 4-1BB costimulatory domain (SEQ ID NO: 233). In some embodiments, the aCAR comprises a CD28 costimulatory domain (SEQ ID NO: 234). In some embodiments, the aCAR comprises a CD3z costimulatory domain (SEQ ID NO: 235). In some embodiments, the aCAR comprises an ITAM comprising a CD3 zeta domain (SEQ ID NO: 236). In some embodiments, the aCAR comprises an ITAM comprising a CD3 zeta 3F domain (SEQ ID NO: 237). In some embodiments, the aCAR comprises an ITAM comprising a CD3 zeta 4F domain (SEQ ID NO: 238). In some embodiments, the aCAR comprises an ITAM comprising a CD3 zeta 40F domain (SEQ ID NO: 239). In some embodiments, the aCAR comprises a signal peptide upstream of the aCAR portion, wherein the signal peptide is a CD8 alpha signal peptide (SEQ ID NO: 161), a GM-CSF signal peptide (SEQ ID NO: 162), or a mIgK signal peptide (SEQ ID NO: 306).

[0400] In some embodiments, the aCAR comprises an scFv component comprising the VHH sequence of EGFR-VHH (SEQ ID NO: 312). In some embodiments, the orientation of the aCAR VH and VL regions is VH-VL. In some embodiments, the orientation of the aCAR VH and VL regions is VL-VH. In some embodiments, the aCAR scFv comprises a (G4S)X3 linker (SEQ ID NO:81) linker that covalently connects the VH and the VL to form the aCAR scFv. In some embodiments, the aCAR scFv comprises a Whitlow linker (SEQ ID NO:82) linker that covalently connects the VH and the VL to form the aCAR scFv. In some embodiments, the aCAR comprises a CD8 alpha hinge TM domain (SEQ ID NO:84). In some embodiments, the aCAR comprises a CD28 hinge TM domain (SEQ ID NO:85). In some embodiments, the aCAR comprises a 4-1BB costimulatory domain (SEQ ID NO: 233). In some embodiments, the aCAR comprises a CD28 costimulatory domain (SEQ ID NO: 234). In some embodiments, the aCAR comprises a CD3z costimulatory domain (SEQ ID NO: 235). In some embodiments, the aCAR comprises an ITAM comprising a CD3 zeta domain (SEQ ID NO: 236). In some embodiments, the aCAR comprises an ITAM comprising a CD3 zeta 3F domain (SEQ ID NO: 237). In some embodiments, the aCAR comprises an ITAM comprising a CD3 zeta 4F domain (SEQ ID NO: 238). In some embodiments, the aCAR comprises an ITAM comprising a CD3 zeta 40F domain (SEQ ID NO: 239). In some embodiments, the aCAR comprises a signal peptide upstream of the aCAR portion, wherein the signal peptide is a CD8 alpha signal peptide (SEQ ID NO: 161), a GM-CSF signal peptide (SEQ ID NO: 162), or a mIgK signal peptide (SEQ ID NO: 306).

[0401] In some embodiments, the aCAR comprises an scFv component comprising the VL and VH sequences of Amatuximab (SEQ ID NOs: 217 and 218). In some embodiments, the orientation of the aCAR VH and VL regions is VH-VL. In some embodiments, the orientation of the aCAR VH and VL regions is VL-VH. In some embodiments, the aCAR scFv comprises a (G4S)X3 linker (SEQ ID NO:81) linker that covalently connects the VH and the VL to form the aCAR scFv. In some embodiments, the aCAR scFv comprises a Whitlow linker (SEQ ID NO:82) linker that covalently connects the VH and the VL to form the aCAR scFv. In some embodiments, the aCAR comprises a CD8 alpha hinge TM domain (SEQ ID NO:84). In some embodiments, the aCAR comprises a CD28 hinge TM domain (SEQ ID NO:85). In some embodiments, the aCAR comprises a 4-1BB costimulatory domain (SEQ ID NO: 233). In some embodiments, the aCAR comprises a CD28 costimulatory domain (SEQ ID NO: 234). In some embodiments, the aCAR comprises a CD3z costimulatory domain (SEQ ID NO: 235). In some embodiments, the aCAR comprises an ITAM comprising a CD3 zeta domain (SEQ ID NO: 236). In some embodiments, the aCAR comprises an ITAM comprising a CD3 zeta 3F domain (SEQ ID NO: 237). In some embodiments, the aCAR comprises an ITAM comprising a CD3 zeta 4F domain (SEQ ID NO: 238). In some embodiments, the aCAR comprises an ITAM comprising a CD3 zeta 40F domain (SEQ ID NO: 239). In some embodiments, the aCAR comprises a signal peptide upstream of the aCAR portion, wherein the signal peptide is a CD8 alpha signal peptide (SEQ ID NO: 161), a GM-CSF signal peptide (SEQ ID NO: 162), or a mIgK signal peptide (SEQ ID NO: 306).

[0402] In some embodiments, the aCAR comprises an scFv component comprising the VL and VH sequences of P4 (SEQ ID NOs: 219 and 220). In some embodiments, the orientation of the aCAR VH and VL regions is VH-VL. In some embodiments, the orientation of the aCAR VH and VL regions is VL-VH. In some embodiments, the aCAR scFv comprises a (G4S)X3 linker (SEQ ID NO:81) linker that covalently connects the VH and the VL to form the aCAR scFv. In some embodiments, the aCAR scFv comprises a Whitlow linker (SEQ ID NO:82) linker that covalently connects the VH and the VL to form the aCAR scFv. In some embodiments, the aCAR comprises a CD8 alpha hinge TM domain (SEQ ID NO:84). In some embodiments, the aCAR comprises a CD28 hinge TM domain (SEQ ID NO:85). In some embodiments, the aCAR comprises a 4-1BB costimulatory domain (SEQ ID NO: 233). In some embodiments, the aCAR comprises a CD28 costimulatory domain (SEQ ID NO: 234). In some embodiments, the aCAR comprises a CD3z costimulatory domain (SEQ ID NO: 235). In some embodiments, the aCAR comprises an ITAM comprising a CD3 zeta domain (SEQ ID NO: 236). In some embodiments, the aCAR comprises an ITAM comprising a CD3 zeta 3F domain (SEQ ID NO: 237). In some embodiments, the aCAR comprises an ITAM comprising a CD3 zeta 4F domain (SEQ ID NO: 238). In some embodiments, the aCAR comprises an ITAM comprising a CD3 zeta 40F domain (SEQ ID NO: 239). In some embodiments, the aCAR comprises a signal peptide upstream of the aCAR portion, wherein the signal peptide is a CD8 alpha signal peptide (SEQ ID NO: 161), a GM-CSF signal peptide (SEQ ID NO: 162), or a mIgK signal peptide (SEQ ID NO: 306).

[0403] In some embodiments, the aCAR comprises an scFv component comprising the VL and VH sequences of SS1 (SEQ ID NOs: 222 and 223). In some embodiments, the orientation of the aCAR VH and VL regions is VH-VL. In some embodiments, the orientation of the aCAR VH and VL regions is VL-VH. In some embodiments, the aCAR scFv comprises a (G4S)X3 linker (SEQ ID NO:81) linker that covalently connects the VH and the VL to form the aCAR scFv. In some embodiments, the aCAR scFv comprises a Whitlow linker (SEQ ID NO:82) linker that covalently connects the VH and the VL to form the aCAR scFv. In some embodiments, the aCAR comprises a CD8 alpha hinge TM domain (SEQ ID NO:84). In some embodiments, the aCAR comprises a CD28 hinge TM domain (SEQ ID NO:85). In some embodiments, the aCAR comprises a 4-1BB costimulatory domain (SEQ ID NO: 233). In some embodiments, the aCAR comprises a CD28 costimulatory domain (SEQ ID NO: 234). In some embodiments, the aCAR comprises a CD3z costimulatory domain (SEQ ID NO: 235). In some embodiments, the aCAR comprises an ITAM comprising a CD3 zeta domain (SEQ ID NO: 236). In some embodiments, the aCAR comprises an ITAM comprising a CD3 zeta 3F domain (SEQ ID NO: 237). In some embodiments, the aCAR comprises an ITAM comprising a CD3 zeta 4F domain (SEQ ID NO: 238). In some embodiments, the aCAR comprises an ITAM comprising a CD3 zeta 40F domain (SEQ ID NO: 239). In some embodiments, the aCAR comprises a signal peptide upstream of the aCAR portion, wherein the signal peptide is a CD8 alpha signal peptide (SEQ ID NO: 161), a GM-CSF signal peptide (SEQ ID NO: 162), or a mIgK signal peptide (SEQ ID NO: 306).

[0404] In some embodiments, the aCAR comprises an scFv component comprising the VHH sequence of SD1 (SEQ ID NO: 225). In some embodiments, the orientation of the aCAR VH and VL regions is VH-VL. In some embodiments, the orientation of the aCAR VH and VL regions is VL-VH. In some embodiments, the aCAR scFv comprises a (G4S)X3 linker (SEQ ID NO:81) linker that covalently connects the VH and the VL to form the aCAR scFv. In some embodiments, the aCAR scFv comprises a Whitlow linker (SEQ ID NO:82) linker that covalently connects the VH and the VL to form the aCAR scFv. In some embodiments, the aCAR comprises a CD8 alpha hinge TM domain (SEQ ID NO:84). In some embodiments, the aCAR comprises a CD28 hinge TM domain (SEQ ID NO:85). In some embodiments, the aCAR comprises a 4-1BB costimulatory domain (SEQ ID NO: 233). In some embodiments, the aCAR comprises a CD28 costimulatory domain (SEQ ID NO: 234). In some embodiments, the aCAR comprises a CD3z costimulatory domain (SEQ ID NO: 235). In some embodiments, the aCAR comprises an ITAM comprising a CD3 zeta domain (SEQ ID NO: 236). In some embodiments, the aCAR comprises an ITAM comprising a CD3 zeta 3F domain (SEQ ID NO: 237). In some embodiments, the aCAR comprises an ITAM comprising a CD3 zeta 4F domain (SEQ ID NO: 238). In some embodiments, the aCAR comprises an ITAM comprising a CD3 zeta 40F domain (SEQ ID NO: 239). In some embodiments, the aCAR comprises a signal peptide upstream of the aCAR portion, wherein the signal peptide is a CD8 alpha signal peptide (SEQ ID NO: 161), a GM-CSF signal peptide (SEQ ID NO: 162), or a mIgK signal peptide (SEQ ID NO: 306).

[0405] In some embodiments, the aCAR comprises an scFv component comprising the VHH sequence of SD2 (SEQ ID NO: 226). In some embodiments, the orientation of the aCAR VH and VL regions is VH-VL. In some embodiments, the orientation of the aCAR VH and VL regions is VL-VH. In some embodiments, the aCAR scFv comprises a (G4S)X3 linker (SEQ ID NO:81) linker that covalently connects the VH and the VL to form the aCAR scFv. In some embodiments, the aCAR scFv comprises a Whitlow linker (SEQ ID NO:82) linker that covalently connects the VH and the VL to form the aCAR scFv. In some embodiments, the aCAR comprises a CD8 alpha hinge TM domain (SEQ ID NO:84). In some embodiments, the aCAR comprises a CD28 hinge TM domain (SEQ ID NO:85). In some embodiments, the aCAR comprises a 4-1BB costimulatory domain (SEQ ID NO: 233). In some embodiments, the aCAR comprises a CD28 costimulatory domain (SEQ ID NO: 234). In some embodiments, the aCAR comprises a CD3z costimulatory domain (SEQ ID NO: 235). In some embodiments, the aCAR comprises an ITAM comprising a CD3 zeta domain (SEQ ID NO: 236). In some embodiments, the aCAR comprises an ITAM comprising a CD3 zeta 3F domain (SEQ ID NO: 237). In some embodiments, the aCAR comprises an ITAM comprising a CD3 zeta 4F domain (SEQ ID NO: 238). In some embodiments, the aCAR comprises an ITAM comprising a CD3 zeta 40F domain (SEQ ID NO: 239). In some embodiments, the aCAR comprises a signal peptide upstream of the aCAR portion, wherein the signal peptide is a CD8 alpha signal peptide (SEQ ID NO: 161), a GM-CSF signal peptide (SEQ ID NO: 162), or a mIgK signal peptide (SEQ ID NO: 306).

[0406] In some embodiments, the aCAR comprises an scFv component comprising the VL and VH sequences of 1H7 (SEQ ID NOs: 227 and 228). In some embodiments, the orientation of the aCAR VH and VL regions is VH-VL. In some embodiments, the orientation of the aCAR VH and VL regions is VL-VH. In some embodiments, the aCAR scFv comprises a (G4S)X3 linker (SEQ ID NO:81) linker that covalently connects the VH and the VL to form the aCAR scFv. In some embodiments, the aCAR scFv comprises a Whitlow linker (SEQ ID NO:82) linker that covalently connects the VH and the VL to form the aCAR scFv. In some embodiments, the aCAR comprises a CD8 alpha hinge TM domain (SEQ ID NO:84). In some embodiments, the aCAR comprises a CD28 hinge TM domain (SEQ ID NO:85). In some embodiments, the aCAR comprises a 4-1BB costimulatory domain (SEQ ID NO: 233). In some embodiments, the aCAR comprises a CD28 costimulatory domain (SEQ ID NO: 234). In some embodiments, the aCAR comprises a CD3z costimulatory domain (SEQ ID NO: 235). In some embodiments, the aCAR comprises an ITAM comprising a CD3 zeta domain (SEQ ID NO: 236). In some embodiments, the aCAR comprises an ITAM comprising a CD3 zeta 3F domain (SEQ ID NO: 237). In some embodiments, the aCAR comprises an ITAM comprising a CD3 zeta 4F domain (SEQ ID NO: 238). In some embodiments, the aCAR comprises an ITAM comprising a CD3 zeta 40F domain (SEQ ID NO: 239). In some embodiments, the aCAR comprises a signal peptide upstream of the aCAR portion, wherein the signal peptide is a CD8 alpha signal peptide (SEQ ID NO: 161), a GM-CSF signal peptide (SEQ ID NO: 162), or a mIgK signal peptide (SEQ ID NO: 306).

[0407] In some embodiments, the aCAR comprises an scFv component comprising the VL and VH sequences of 3C02 (SEQ ID NOs: 230 and 231). In some embodiments, the orientation of the aCAR VH and VL regions is VH-VL. In some embodiments, the orientation of the aCAR VH and VL regions is VL-VH. In some embodiments, the aCAR scFv comprises a (G4S)X3 linker (SEQ ID NO:81) linker that covalently connects the VH and the VL to form the aCAR scFv. In some embodiments, the aCAR scFv comprises a Whitlow linker (SEQ ID NO:82) linker that covalently connects the VH and the VL to form the aCAR scFv. In some embodiments, the aCAR comprises a CD8 alpha hinge TM domain (SEQ ID NO:84). In some embodiments, the aCAR comprises a CD28 hinge TM domain (SEQ ID NO:85). In some embodiments, the aCAR comprises a 4-1BB costimulatory domain (SEQ ID NO: 233). In some embodiments, the aCAR comprises a CD28 costimulatory domain (SEQ ID NO: 234). In some embodiments, the aCAR comprises a CD3z costimulatory domain (SEQ ID NO: 235). In some embodiments, the aCAR comprises an ITAM comprising a CD3 zeta domain (SEQ ID NO: 236). In some embodiments, the aCAR comprises an ITAM comprising a CD3 zeta 3F domain (SEQ ID NO: 237). In some embodiments, the aCAR comprises an ITAM comprising a CD3 zeta 4F domain (SEQ ID NO: 238). In some embodiments, the aCAR comprises an ITAM comprising a CD3 zeta 40F domain (SEQ ID NO: 239). In some embodiments, the aCAR comprises a signal peptide upstream of the aCAR portion, wherein the signal peptide is a CD8 alpha signal peptide (SEQ ID NO: 161), a GM-CSF signal peptide (SEQ ID NO: 162), or a mIgK signal peptide (SEQ ID NO: 306).

[0408] In some embodiments, the aCAR has a set of components shown in Table 21.

TABLE 21
aCAR constructs

| | | | | | | | |
|---|---|---|---|---|---|---|---|
| | Signal | | scFv | | | Co- | |
| Construct | Peptide | scFv | Linker | Hinge | TM | stimulatory | Signaling |

Anti-EGFR

| | | | | | | | |
|---|---|---|---|---|---|---|---|
| MC0001 | CD8 | Imgatuzumab | Whitlow | CD8 | CD8 | 4-1BB | CD3 zeta |
| (VR1) | alpha | VL_VH | | alpha | alpha | | |
| MC0002 | CD8 | Cextuximab | Whitlow | CD8 | CD8 | 4-1BB | CD3 zeta |
| (VR2) | alpha | VL_VH | | alpha | alpha | | |
| MC0003 | CD8 | Panitumumab | Whitlow | CD8 | CD8 | 4-1BB | CD3 zeta |
| (VR3) | alpha | VL_VH | | alpha | alpha | | |
| MC0004 | CD8 | Nimotuzumab | Whitlow | CD8 | CD8 | 4-1BB | CD3 zeta |
| (VR4) | alpha | VL_VH | | alpha | alpha | | |
| MC0005 | CD8 | Necitumumab | Whitlow | CD8 | CD8 | 4-1BB | CD3 zeta |
| (VR5) | alpha | VL_VH | | alpha | alpha | | |
| MC0163 | GM- | ICR62 VH | Whitlow | CD8 | CD8 | 4-1BB | CD3 zeta |
| (VR163) | CSF | VL | | alpha | alpha | | |
| MC0164 | GM- | ICR62 VL | Whitlow | CD8 | CD8 | 4-1BB | CD3 zeta |
| (VR164) | CSF | VH | | alpha | alpha | | |
| MC0165 | GM- | Matuzumab | Whitlow | CD8 | CD8 | 4-1BB | CD3 zeta |
| (VR165) | CSF | VH VL BBz | | alpha | alpha | | |
| MC0166 | GM- | Matuzumab | Whitlow | CD8 | CD8 | 4-1BB | CD3 zeta |
| (VR166) | CSF | VL VH BBz | | alpha | alpha | | |
| MC0167 | GM- | C10 VH VL | Whitlow | CD8 | CD8 | 4-1BB | CD3 zeta |
| (VR167) | CSF | BBz | | alpha | alpha | | |
| MC0168 | GM- | C10 VL VH | Whitlow | CD8 | CD8 | 4-1BB | CD3 zeta |
| (VR168) | CSF | BBz | | alpha | alpha | | |
| MC0169 | GM- | Zalutumumab | Whitlow | CD8 | CD8 | 4-1BB | CD3 zeta |
| (VR169) | CSF | VH VL BBz | | alpha | alpha | | |
| MC0170 | GM- | Zalutumumab | Whitlow | CD8 | CD8 | 4-1BB | CD3 zeta |
| (VR170) | CSF | VL VH BBz | | alpha | alpha | | |
| MC0171 | GM- | P1X VH VL | Whitlow | CD8 | CD8 | 4-1BB | CD3 zeta |
| (VR171) | CSF | BBz | | alpha | alpha | | |
| MC0172 | GM- | P1X VL VH | Whitlow | CD8 | CD8 | 4-1BB | CD3 zeta |
| (VR172) | CSF | BBz | | alpha | alpha | | |
| MC0173 | GM- | P2X VH VL | Whitlow | CD8 | CD8 | 4-1BB | CD3 zeta |
| (VR173) | CSF | BBz | | alpha | alpha | | |
| MC0174 | GM- | P2X VL VH | Whitlow | CD8 | CD8 | 4-1BB | CD3 zeta |
| (VR174) | CSF | BBz | | alpha | alpha | | |
| MC0175 | GM- | P3X VH VL | Whitlow | CD8 | CD8 | 4-1BB | CD3 zeta |
| (VR175) | CSF | BBz | | alpha | alpha | | |
| MC0176 | GM- | P3X VL VH | Whitlow | CD8 | CD8 | 4-1BB | CD3 zeta |
| (VR176) | CSF | BBz | | alpha | alpha | | |
| MC0177 | GM- | EGFR-la1- | Whitlow | CD8 | CD8 | 4-1BB | CD3 zeta |
| (VR177) | CSF | VHH BBz | | alpha | alpha | | |
| N/A | CD8 | ICR62 | Whitlow | CD8 | CD8 | 4-1BB | CD3 zeta |
| | alpha | VH_VL | | alpha | alpha | | |
| N/A | CD8 | ICR62 | Whitlow | CD8 | CD8 | 4-1BB | CD3 zeta |
| | alpha | VL_VH | | alpha | alpha | | |
| N/A | CD8 | Matuzumab | Whitlow | CD8 | CD8 | 4-1BB | CD3 zeta |
| | alpha | VH_VL | | alpha | alpha | | |
| N/A | CD8 | Matuzumab | Whitlow | CD8 | CD8 | 4-1BB | CD3 zeta |
| | alpha | VL_VH | | alpha | alpha | | |
| N/A | CD8 | C10 VH VL | Whitlow | CD8 | CD8 | 4-1BB | CD3 zeta |
| | alpha | BBz | | alpha | alpha | | |
| N/A | CD8 | C10 VL VH | Whitlow | CD8 | CD8 | 4-1BB | CD3 zeta |
| | alpha | BBz | | alpha | alpha | | |
| N/A | CD8 | Zalutumumab | whitlow | CD8 | CD8 | 4-1BB | CD3 zeta |
| | alpha | VH VL | | alpha | alpha | | |
| MC0483 | CD8 | Zalutumumab | whitlow | CD8 | CD8 | 4-1BB | CD3 zeta |
| (VR483) | alpha | VL_VH | | alpha | alpha | | |
| N/A | CD8 | P1X VH VL | Whitlow | CD8 | CD8 | 4-1BB | CD3 zeta |
| | alpha | BBz | | alpha | alpha | | |
| N/A | CD8 | P1X VL VH | Whitlow | CD8 | CD8 | 4-1BB | CD3 zeta |
| | alpha | BBz | | alpha | alpha | | |
| N/A | CD8 | P2X VH VL | Whitlow | CD8 | CD8 | 4-1BB | CD3 zeta |
| | alpha | BBz | | alpha | alpha | | |
| N/A | CD8 | P2X VL VH | Whitlow | CD8 | CD8 | 4-1BB | CD3 zeta |
| | alpha | BBz | | alpha | alpha | | |
| N/A | CD8 | P3X VH VL | Whitlow | CD8 | CD8 | 4-1BB | CD3 zeta |
| | alpha | BBz | | alpha | alpha | | |
| N/A | CD8 | P3X VL VH | Whitlow | CD8 | CD8 | 4-1BB | CD3 zeta |
| | alpha | BBz | | alpha | alpha | | |
| MC0484 | CD8 | EGFR-l1a- | whitlow | CD8 | CD8 | 4-1BB | CD3 zeta |
| (VR484) | alpha | VHH | | alpha | alpha | | |

Anti-HER2

| | | | | | | | |
|---|---|---|---|---|---|---|---|
| MC0006 | CD8 | Trastuzumab | Whitlow | CD8 | CD8 | 4-1BB | CD3 zeta |
| (VR6) | alpha | VL_VH | | alpha | alpha | | |
| MC0007 | CD8 | Pertuzumab | Whitlow | CD8 | CD8 | 4-1BB | CD3 zeta |
| (VR7) | alpha | VL_VH | | alpha | alpha | | |
| MC0008 | CD8 | FRP5 VL VH | Whitlow | CD8 | CD8 | 4-1BB | CD3 zeta |
| (VR8) | alpha | | | alpha | alpha | | |
| MC0009 | CD8 | A21 VL VH | Whitlow | CD8 | CD8 | 4-1BB | CD3 zeta |
| (VR9) | alpha | | | alpha | alpha | | |
| MC0178 | GM- | XMT1517 | Whitlow | CD8 | CD8 | 4-1BB | CD3 zeta |
| (VR178) | CSF | VH VL | | alpha | alpha | | |
| MC0179 | GM- | XMT1517 | Whitlow | CD8 | CD8 | 4-1BB | CD3 zeta |
| (VR179) | CSF | VL VH | | alpha | alpha | | |
| MC0180 | GM- | XMT1518 | Whitlow | CD8 | CD8 | 4-1BB | CD3 zeta |
| (VR180) | CSF | VH VL | | alpha | alpha | | |
| MC0181 | GM- | XMT1518 | Whitlow | CD8 | CD8 | 4-1BB | CD3 zeta |
| (VR181) | CSF | VL VH | | alpha | alpha | | |
| MC0182 | GM- | XMT1519 | Whitlow | CD8 | CD8 | 4-1BB | CD3 zeta |
| (VR182) | CSF | VH VL | | alpha | alpha | | |
| MC0183 | GM- | XMT1519 | Whitlow | CD8 | CD8 | 4-1BB | CD3 zeta |
| (VR183) | CSF | VL VH | | alpha | alpha | | |
| MC0184 | GM- | FWP51 | Whitlow | CD8 | CD8 | 4-1BB | CD3 zeta |
| (VR184) | CSF | VH VL | | alpha | alpha | | |
| MC0185 | GM- | FWP51 | Whitlow | CD8 | CD8 | 4-1BB | CD3 zeta |
| (VR185) | CSF | VL VH | | alpha | alpha | | |
| N/A | GM- | Trastuzumab | Whitlow | CD8 | CD8 | 4-1BB | CD3 zeta |
| | CSF | VL_VH | | alpha | alpha | | |
| N/A | GM- | Pertuzumab | Whitlow | CD8 | CD8 | 4-1BB | CD3 zeta |
| | CSF | VL_VH | | alpha | alpha | | |
| N/A | GM- | FRP5 VL VH | Whitlow | CD8 | CD8 | 4-1BB | CD3 zeta |
| | CSF | | | alpha | alpha | | |
| N/A | GM- | A21 VL VH | Whitlow | CD8 | CD8 | 4-1BB | CD3 zeta |
| | CSF | | | alpha | alpha | | |
| N/A | CD8 | XMT1517 | Whitlow | CD8 | CD8 | 4-1BB | CD3 zeta |
| | alpha | VH VL | | alpha | alpha | | |
| N/A | CD8 | XMT1517 | Whitlow | CD8 | CD8 | 4-1BB | CD3 zeta |
| | alpha | VL VH | | alpha | alpha | | |
| N/A | CD8 | XMT1518 | Whitlow | CD8 | CD8 | 4-1BB | CD3 zeta |
| | alpha | VH VL | | alpha | alpha | | |
| N/A | CD8 | XMT1518 | Whitlow | CD8 | CD8 | 4-1BB | CD3 zeta |
| | alpha | VL VH | | alpha | alpha | | |
| N/A | CD8 | XMT1519 | Whitlow | CD8 | CD8 | 4-1BB | CD3 zeta |
| | alpha | VH VL | | alpha | alpha | | |
| N/A | CD8 | XMT1519 | Whitlow | CD8 | CD8 | 4-1BB | CD3 zeta |
| | alpha | VL VH | | alpha | alpha | | |
| N/A | CD8 | FWP51 | Whitlow | CD8 | CD8 | 4-1BB | CD3 zeta |
| | alpha | VH VL | | alpha | alpha | | |
| N/A | CD8 | FWP51 | Whitlow | CD8 | CD8 | 4-1BB | CD3 zeta |
| | alpha | VL VH | | alpha | alpha | | |

Anti-Mesothelin

| | | | | | | | |
|---|---|---|---|---|---|---|---|
| MC0159 | GM- | Amatuximab | Whitlow | CD8 | CD8 | 4-1BB | CD3 zeta |
| (VR159) | CSF | VH VL | | alpha | alpha | | |
| MC0160 | GM- | Amatuximab | Whitlow | CD8 | CD8 | 4-1BB | CD3 zeta |
| (VR160) | CSF | VL VL | | alpha | alpha | | |
| MC0161 | GM- | P4 VH VL | Whitlow | CD8 | CD8 | 4-1BB | CD3 zeta |
| (VR161) | CSF | | | alpha | alpha | | |
| MC0162 | GM- | P4 VL VH | Whitlow | CD8 | CD8 | 4-1BB | CD3 zeta |
| (VR162) | CSF | | | alpha | alpha | | |
| MC0186 | GM- | SS1 VH VL | Whitlow | CD8 | CD8 | 4-1BB | CD3 zeta |
| (VR186) | CSF | | | alpha | alpha | | |
| MC0187 | GM- | SS1 VL VH | Whitlow | CD8 | CD8 | 4-1BB | CD3 zeta |
| (VR187) | CSF | | | alpha | alpha | | |
| MC0188 | GM- | SD1 VHH | Whitlow | CD8 | CD8 | 4-1BB | CD3 zeta |
| (VR188) | CSF | | | alpha | alpha | | |
| MC0189 | GM- | SD2 VHH | Whitlow | CD8 | CD8 | 4-1BB | CD3 zeta |
| (VR189) | CSF | | | alpha | alpha | | |
| MC0190 | GM- | 1H07 VH VL | Whitlow | CD8 | CD8 | 4-1BB | CD3 zeta |
| (VR190) | CSF | | | alpha | alpha | | |
| MC0191 | GM- | 1H07 VL VH | Whitlow | CD8 | CD8 | 4-1BB | CD3 zeta |
| (VR191) | CSF | | | alpha | alpha | | |
| MC0192 | GM- | 3C02 VH VL | Whitlow | CD8 | CD8 | 4-1BB | CD3 zeta |
| (VR192) | CSF | | | alpha | alpha | | |
| MC0193 | GM- | 3C02 VL VH | Whitlow | CD8 | CD8 | 4-1BB | CD3 zeta |
| (VR193) | CSF | | | alpha | alpha | | |
| N/A | CD8 | Amatuximab | Whitlow | CD8 | CD8 | 4-1BB | CD3 zeta |
| | alpha | VH VL | | alpha | alpha | | |
| MC0485 | CD8 | Amatuximab | Whitlow | CD8 | CD8 | 4-1BB | CD3 zeta |
| (VR485) | alpha | VL VH | | alpha | alpha | | |
| N/A | CD8 | P4 VH VL | Whitlow | CD8 | CD8 | 4-1BB | CD3 zeta |
| | alpha | | | alpha | alpha | | |
| MC0487 | CD8 | P4 VL VH | Whitlow | CD8 | CD8 | 4-1BB | CD3 zeta |
| (VR487) | alpha | | | alpha | alpha | | |
| N/A | CD8 | SS1 VH VL | Whitlow | CD8 | CD8 | 4-1BB | CD3 zeta |
| | alpha | | | alpha | alpha | | |
| MC0488 | CD8 | SS1 VL VH | Whitlow | CD8 | CD8 | 4-1BB | CD3 zeta |
| (VR488) | alpha | | | alpha | alpha | | |
| N/A | CD8 | SD1 VHH | Whitlow | CD8 | CD8 | 4-1BB | CD3 zeta |
| | alpha | | | alpha | alpha | | |
| N/A | CD8 | SD2 VHH | Whitlow | CD8 | CD8 | 4-1BB | CD3 zeta |
| | alpha | | | alpha | alpha | | |
| N/A | CD8 | 1H07 VH VL | Whitlow | CD8 | CD8 | 4-1BB | CD3 zeta |
| | alpha | | | alpha | alpha | | |
| MC0490 | CD8 | 1H07 VL VH | Whitlow | CD8 | CD8 | 4-1BB | CD3 zeta |
| (VR490) | alpha | | | alpha | alpha | | |
| N/A | CD8 | 3C02 VH VL | Whitlow | CD8 | CD8 | 4-1BB | CD3 zeta |
| | alpha | | | alpha | alpha | | |
| N/A | CD8 | 3C02 VL VH | Whitlow | CD8 | CD8 | 4-1BB | CD3 zeta |
| | alpha | | | alpha | alpha | | |
| MC0486 | CD8 | M1 VL VH | Whitlow | CD8 | CD8 | 4-1BB | CD3 zeta |
| (VR486) | alpha | | | alpha | alpha | | |
| MC0498 | CD8 | M5 VL VH | Whitlow | CD8 | CD8 | 4-1BB | CD3 zeta |
| (VR498) | alpha | | | alpha | alpha | | |
| MC0489 | CD8 | 7D9.V3 VL | Whitlow | CD8 | CD8 | 4-1BB | CD3 zeta |
| (VR489) | alpha | VH | | alpha | alpha | | |

[0409] 14. Optional shRNA

[0410] In some embodiments, the bicistronic construct comprises an optional short hairpin RNA (shRNA). In some embodiments, the bicistronic construct comprises an HLA-A2 shRNA. In some embodiments, the bicistronic construct comprises an HLA-A2 shRNA having a sequence of SEQ ID NO:240. In some embodiments, the bicistronic construct comprises an HLA-A2 shRNA having a sequence of SEQ ID NO:241. In some embodiments, the bicistronic construct comprises an HLA-beta2 shRNA. In some embodiments, the bicistronic construct comprises an HLA-beta2 shRNA having a sequence of SEQ ID NO:242. In some embodiments, the bicistronic construct comprises an HLA-A2 shRNA having both sequences of SEQ ID NO:240 and SEQ ID NO:242. In some embodiments, the bicistronic construct comprises an HLA-A2 shRNA having both sequences of SEQ ID NO:241 and SEQ ID NO:242.

TABLE 22
shRNA sequences

| | SEQ | |
|---|---|---|
| Sequence | ID | |
| Information | NO | Amino acid sequence |
| HLA-A2-shRNA | 240 | GGATTACATCGCCCTGAAAGTTCAAGAGACTTTCAGGGC |
| 1 | | GATGTAATCCTTTTTT |
| HLA-A2-shRNA | 241 | CACCTGCCATGTGCAGCATGATTTGTGTAGTCATGCTGC |
| 2 | | ACATGGCAGGTG |
| HLA-beta2- | 242 | GAATGGAGAGAGAATTGAATTCAAGAGATTCAATTCTCT |
| shRNA | | CTCCATTC |

[0411] 15. Monocistronic Constructs

[0412] In some embodiments, the iCAR and aCAR constructs are expressed by separate vectors, and the iCAR/aCAR pairs are co-expressed in cells. Methods of co-expressing multiple constructs in the same cell are well known in the art and include, e.g., co-transfection of two or more expression vectors, integration of the constructs into the same or different loci within a cell, optionally followed by enrichment for co-expression.

[0413] III. CAR-T Bicistronic ICAR/aCAR Vector Construction

[0414] In some embodiments, the bicistronic construct or co-transduction of monocistronic aCAR and iCAR constructs allows for the iCAR and the aCAR to be encoded by a single nucleic acid vector. In some embodiments, the present invention provides a vector comprising a nucleic acid molecule of the invention as defined in any one of the above embodiments, and at least one control element, such as a promoter, operably linked to the nucleic acid molecule.

[0415] In some embodiments, the vector is a lentiviral (LV) vector. In some embodiments, the LV vector is a commercially available LV vector. In some embodiments, the LV vector includes but is not limited to pLenti, pLVX-Puro, pLVX-IRES-Puro/Neo/Hygro, pLVx-EF1a-IRES (TAKARA), and/or pcLV-EF1a (Sirion). In some embodiments, the LV vector is pLVX-Puro. In some embodiments, the LV vector is pLVX-IRES-Puro/Neo/Hygro. In some embodiments, the LV vector is pLVx-EF1a-IRES (TAKARA). In some embodiments, the LV vector is pcLV-EF1a (Sirion).

[0416] In some embodiments, the vector comprises an EF1 promoter. In some embodiments, the vector comprises a CMV promoter. In some embodiments, the vector comprises a PGK promoter.

[0417] In some embodiments, the nucleotide sequence of the vector comprises an internal ribosome entry site (IRES) between the nucleotide sequence encoding for the aCAR and the nucleotide sequence encoding for the iCAR. In general, the nucleotide sequence encoding for the aCAR and the nucleotide sequence encoding for the iCAR can be in any sequential order, but in particular embodiments, the nucleotide sequence encoding for the aCAR is downstream of the nucleotide sequence encoding for the iCAR.

[0418] In some embodiments, the nucleotide sequences encoding for the aCAR and the iCAR are encoded on a single vector. In some embodiments, the vector comprises an internal ribosome entry site (IRES) between the nucleotide sequence encoding for the aCAR and the nucleotide sequence encoding for the iCAR. In some embodiments, the nucleotide sequence encoding for the aCAR is downstream of the nucleotide sequence encoding for the iCAR. In some embodiments, the nucleotide sequence comprises a viral self-cleaving 2A peptide located between the nucleotide sequence encoding for the aCAR and the nucleotide sequence encoding for the iCAR. In some embodiments, the nucleotide sequence of the vector comprises a viral self-cleaving 2A peptide between the nucleotide sequence encoding for the aCAR and the nucleotide sequence encoding for the iCAR. In some embodiments, the viral self-cleaving 2A peptide includes is the T2A from Thosea asigna virus (TaV). In some embodiments, the vector comprises a nucleotide sequence encoding the constitutive aCAR linked via a flexible linker to said iCAR.

[0419] The immune cells may be transfected with the appropriate nucleic acid molecule described herein by e.g., RNA transfection or by incorporation in a plasmid fit for replication and/or transcription in a eukaryotic cell or a viral vector. In some embodiments, the vector is selected from a retroviral or lentiviral vector.

[0420] Combinations of retroviral vector and an appropriate packaging line can also be used, where the capsid proteins will be functional for infecting human cells. Several amphotropic virus-producing cell lines are known, including PA12 (Miller, et al. (1985) Mol. Cell. Biol. 5:431-437); PA317 (Miller, et al. (1986) Mol. Cell. Biol. 6:2895-2902); and CRIP (Danos, et al. (1988) Proc. Nati. Acad. Sci. USA 85:6460-6464). Alternatively, non-amphotropic particles can be used, such as, particles pseudotyped with VSVG, RD 114 or GAL V envelope and in some embodiments produced in a PG13 cell line. Cells can further be transduced by direct co-culture with producer cells, e.g., by the method of Bregni, et al. (1992) Blood 80: 1418-1422, or culturing with viral supernatant alone or concentrated vector stocks, e.g., by the method of Xu, et al. (1994) Exp. Hemat. 22:223-230; and Hughes, et al. (1992) J Clin. Invest. 89: 1817.

[0421] In some embodiments, the iCAR and aCAR are encoded by different constructs, for example as separate monocistronic aCAR and iCAR constructs. In some embodiments, the iCAR and aCAR are encoded by a single construct, for example as separate monocistronic aCAR and iCAR constructs within a single expression vector.

[0422] In some embodiments, the iCAR and aCAR are encoded by the same expression vector. In some embodiments, the expression vector comprises a nucleic acid sequence that encodes a bicistronic iCAR/aCAR selected from the group consisting of SEQ ID NO:1, SEQ ID NO:3, SEQ ID NO:5, SEQ ID NO:7, SEQ ID NO:9, SEQ ID NO: 11, SEQ ID NO:13, SEQ ID NO:15, SEQ ID NO:17, SEQ ID NO:19, SEQ ID NO:21, SEQ ID NO:23, SEQ ID NO:25, SEQ ID NO:27, SEQ ID NO:29, SEQ ID NO:31, SEQ ID NO:33, SEQ ID NO:35, SEQ ID NO:275, SEQ ID NO:277, SEQ ID NO:279, SEQ ID NO:281, SEQ ID NO:321, SEQ ID NO:323, and SEQ ID NO:325.

[0423] In some embodiments, the expression vector comprises a bicistronic iCAR/aCAR nucleic acid sequence selected from the group consisting of SEQ ID NO:1, SEQ ID NO:3, SEQ ID NO:5, SEQ ID NO:7, SEQ ID NO:9, SEQ ID NO: 11, SEQ ID NO:13, SEQ ID NO:15, SEQ ID NO:17, SEQ ID NO:19, SEQ ID NO:21, SEQ ID NO:23, SEQ ID NO:25, SEQ ID NO:27, SEQ ID NO:29, SEQ ID NO:31, SEQ ID NO:33, SEQ ID NO:35, SEQ ID NO:275, SEQ ID NO:277, SEQ ID NO:279, SEQ ID NO:281, SEQ ID NO:321, SEQ ID NO:323, and SEQ ID NO:325.

[0424] In some embodiments, the expression vector comprises a bicistronic iCAR/aCAR nucleic acid that encodes an amino acid sequence selected from the group consisting of SEQ ID NO:2, SEQ ID NO:4, SEQ ID NO:6, SEQ ID NO:8, SEQ ID NO:10, SEQ ID NO:12, SEQ ID NO:14, SEQ ID NO:16, SEQ ID NO:18, SEQ ID NO:20, SEQ ID NO:22, SEQ ID NO:24, SEQ ID NO:26, SEQ ID NO:28, SEQ ID NO:30, SEQ ID NO:32, SEQ ID NO:34, SEQ ID NO:36, SEQ ID NO:276, SEQ ID NO:278, SEQ ID NO:280, SEQ ID NO:282, SEQ ID NO:322, SEQ ID NO:324, and SEQ ID NO:326.

[0425] In some embodiments, the nucleic acid sequence that encodes a bicistronic iCAR/aCAR exhibits 75%, 80%, 85%, 88%, 90%, 91%, 92%, 93%, 94%, 95%, 96%, 97%, 98%, 99% or 100% sequence identity to a nucleic acid sequence selected from the group consisting of SEQ ID NO:1, SEQ ID NO:3, SEQ ID NO:5, SEQ ID NO:7, SEQ ID NO:9, SEQ ID NO:11, SEQ ID NO:13, SEQ ID NO:15, SEQ ID NO:17, SEQ ID NO:19, SEQ ID NO:21, SEQ ID NO:23, SEQ ID NO:25, SEQ ID NO:27, SEQ ID NO:29, SEQ ID NO:31, SEQ ID NO:33, SEQ ID NO:35, SEQ ID NO:275, SEQ ID NO:277, SEQ ID NO:279, SEQ ID NO:281, SEQ ID NO:321, SEQ ID NO:323, and SEQ ID NO:325.

[0426] In some embodiments, the nucleic acid sequence that encodes a bicistronic iCAR/aCAR exhibits at least 75% sequence identity to a nucleic acid sequence selected from the group consisting of SEQ ID NO:1, SEQ ID NO:3, SEQ ID NO:5, SEQ ID NO:7, SEQ ID NO:9, SEQ ID NO: 11, SEQ ID NO:13, SEQ ID NO:15, SEQ ID NO:17, SEQ ID NO:19, SEQ ID NO:21, SEQ ID NO:23, SEQ ID NO:25, SEQ ID NO:27, SEQ ID NO:29, SEQ ID NO:31, SEQ ID NO:33, SEQ ID NO:35, SEQ ID NO:275, SEQ ID NO:277, SEQ ID NO:279, SEQ ID NO:281, SEQ ID NO:321, SEQ ID NO:323, and SEQ ID NO:325.

[0427] In some embodiments, the nucleic acid sequence that encodes a bicistronic iCAR/aCAR exhibits at least 80% sequence identity to a nucleic acid sequence selected from the group consisting of SEQ ID NO:1, SEQ ID NO:3, SEQ ID NO:5, SEQ ID NO:7, SEQ ID NO:9, SEQ ID NO: 11, SEQ ID NO:13, SEQ ID NO:15, SEQ ID NO:17, SEQ ID NO:19, SEQ ID NO:21, SEQ ID NO:23, SEQ ID NO:25, SEQ ID NO:27, SEQ ID NO:29, SEQ ID NO:31, SEQ ID NO:33, SEQ ID NO:35, SEQ ID NO:275, SEQ ID NO:277, SEQ ID NO:279, SEQ ID NO:281, SEQ ID NO:321, SEQ ID NO:323, and SEQ ID NO:325.

[0428] In some embodiments, the nucleic acid sequence that encodes a bicistronic iCAR/aCAR exhibits at least 85% sequence identity to a nucleic acid sequence selected from the group consisting of SEQ ID NO:1, SEQ ID NO:3, SEQ ID NO:5, SEQ ID NO:7, SEQ ID NO:9, SEQ ID NO: 11, SEQ ID NO:13, SEQ ID NO:15, SEQ ID NO:17, SEQ ID NO:19, SEQ ID NO:21, SEQ ID NO:23, SEQ ID NO:25, SEQ ID NO:27, SEQ ID NO:29, SEQ ID NO:31, SEQ ID NO:33, SEQ ID NO:35, SEQ ID NO:275, SEQ ID NO:277, SEQ ID NO:279, SEQ ID NO:281, SEQ ID NO:321, SEQ ID NO:323, and SEQ ID NO:325.

[0429] In some embodiments, the nucleic acid sequence that encodes a bicistronic iCAR/aCAR exhibits at least 90% sequence identity to a nucleic acid sequence selected from the group consisting of SEQ ID NO:1, SEQ ID NO:3, SEQ ID NO:5, SEQ ID NO:7, SEQ ID NO:9, SEQ ID NO: 11, SEQ ID NO:13, SEQ ID NO:15, SEQ ID NO:17, SEQ ID NO:19, SEQ ID NO:21, SEQ ID NO:23, SEQ ID NO:25, SEQ ID NO:27, SEQ ID NO:29, SEQ ID NO:31, SEQ ID NO:33, SEQ ID NO:35, SEQ ID NO:275, SEQ ID NO:277, SEQ ID NO:279, SEQ ID NO:281, SEQ ID NO:321, SEQ ID NO:323, and SEQ ID NO:325.

[0430] In some embodiments, the nucleic acid sequence that encodes a bicistronic iCAR/aCAR exhibits at least 91% sequence identity to a nucleic acid sequence selected from the group consisting of SEQ ID NO:1, SEQ ID NO:3, SEQ ID NO:5, SEQ ID NO:7, SEQ ID NO:9, SEQ ID NO: 11, SEQ ID NO:13, SEQ ID NO:15, SEQ ID NO:17, SEQ ID NO:19, SEQ ID NO:21, SEQ ID NO:23, SEQ ID NO:25, SEQ ID NO:27, SEQ ID NO:29, SEQ ID NO:31, SEQ ID NO:33, SEQ ID NO:35, SEQ ID NO:275, SEQ ID NO:277, SEQ ID NO:279, SEQ ID NO:281, SEQ ID NO:321, SEQ ID NO:323, and SEQ ID NO:325.

[0431] In some embodiments, the nucleic acid sequence that encodes a bicistronic iCAR/aCAR exhibits at least 92% sequence identity to a nucleic acid sequence selected from the group consisting of SEQ ID NO:1, SEQ ID NO:3, SEQ ID NO:5, SEQ ID NO:7, SEQ ID NO:9, SEQ ID NO: 11, SEQ ID NO:13, SEQ ID NO:15, SEQ ID NO:17, SEQ ID NO:19, SEQ ID NO:21, SEQ ID NO:23, SEQ ID NO:25, SEQ ID NO:27, SEQ ID NO:29, SEQ ID NO:31, SEQ ID NO:33, SEQ ID NO:35, SEQ ID NO:275, SEQ ID NO:277, SEQ ID NO:279, SEQ ID NO:281, SEQ ID NO:321, SEQ ID NO:323, and SEQ ID NO:325.

[0432] In some embodiments, the nucleic acid sequence that encodes a bicistronic iCAR/aCAR exhibits at least 93% sequence identity to a nucleic acid sequence selected from the group consisting of SEQ ID NO:1, SEQ ID NO:3, SEQ ID NO:5, SEQ ID NO:7, SEQ ID NO:9, SEQ ID NO: 11, SEQ ID NO:13, SEQ ID NO:15, SEQ ID NO:17, SEQ ID NO:19, SEQ ID NO:21, SEQ ID NO:23, SEQ ID NO:25, SEQ ID NO:27, SEQ ID NO:29, SEQ ID NO:31, SEQ ID NO:33, SEQ ID NO:35, SEQ ID NO:275, SEQ ID NO:277, SEQ ID NO:279, SEQ ID NO:281, SEQ ID NO:321, SEQ ID NO:323, and SEQ ID NO:325.

[0433] In some embodiments, the nucleic acid sequence that encodes a bicistronic iCAR/aCAR exhibits at least 94% sequence identity to a nucleic acid sequence selected from the group consisting of SEQ ID NO:1, SEQ ID NO:3, SEQ ID NO:5, SEQ ID NO:7, SEQ ID NO:9, SEQ ID NO: 11, SEQ ID NO:13, SEQ ID NO:15, SEQ ID NO:17, SEQ ID NO:19, SEQ ID NO:21, SEQ ID NO:23, SEQ ID NO:25, SEQ ID NO:27, SEQ ID NO:29, SEQ ID NO:31, SEQ ID NO:33, SEQ ID NO:35, SEQ ID NO:275, SEQ ID NO:277, SEQ ID NO:279, SEQ ID NO:281, SEQ ID NO:321, SEQ ID NO:323, and SEQ ID NO:325.

[0434] In some embodiments, the nucleic acid sequence that encodes a bicistronic iCAR/aCAR exhibits at least 95% sequence identity to a nucleic acid sequence selected from the group consisting of SEQ ID NO:1, SEQ ID NO:3, SEQ ID NO:5, SEQ ID NO:7, SEQ ID NO:9, SEQ ID NO: 11, SEQ ID NO:13, SEQ ID NO:15, SEQ ID NO:17, SEQ ID NO:19, SEQ ID NO:21, SEQ ID NO:23, SEQ ID NO:25, SEQ ID NO:27, SEQ ID NO:29, SEQ ID NO:31, SEQ ID NO:33, SEQ ID NO:35, SEQ ID NO:275, SEQ ID NO:277, SEQ ID NO:279, SEQ ID NO:281, SEQ ID NO:321, SEQ ID NO:323, and SEQ ID NO:325.

[0435] In some embodiments, the nucleic acid sequence that encodes a bicistronic iCAR/aCAR exhibits at least 96% sequence identity to a nucleic acid sequence selected from the group consisting of SEQ ID NO:1, SEQ ID NO:3, SEQ ID NO:5, SEQ ID NO:7, SEQ ID NO:9, SEQ ID NO: 11, SEQ ID NO:13, SEQ ID NO:15, SEQ ID NO:17, SEQ ID NO:19, SEQ ID NO:21, SEQ ID NO:23, SEQ ID NO:25, SEQ ID NO:27, SEQ ID NO:29, SEQ ID NO:31, SEQ ID NO:33, SEQ ID NO:35, SEQ ID NO:275, SEQ ID NO:277, SEQ ID NO:279, SEQ ID NO:281, SEQ ID NO:321, SEQ ID NO:323, and SEQ ID NO:325.

[0436] In some embodiments, the nucleic acid sequence that encodes a bicistronic iCAR/aCAR exhibits at least 97% sequence identity to a nucleic acid sequence selected from the group consisting of SEQ ID NO:1, SEQ ID NO:3, SEQ ID NO:5, SEQ ID NO:7, SEQ ID NO:9, SEQ ID NO: 11, SEQ ID NO:13, SEQ ID NO:15, SEQ ID NO:17, SEQ ID NO:19, SEQ ID NO:21, SEQ ID NO:23, SEQ ID NO:25, SEQ ID NO:27, SEQ ID NO:29, SEQ ID NO:31, SEQ ID NO:33, SEQ ID NO:35, SEQ ID NO:275, SEQ ID NO:277, SEQ ID NO:279, SEQ ID NO:281, SEQ ID NO:321, SEQ ID NO:323, and SEQ ID NO:325.

[0437] In some embodiments, the nucleic acid sequence that encodes a bicistronic iCAR/aCAR exhibits at least 98% sequence identity to a nucleic acid sequence selected from the group consisting of SEQ ID NO:1, SEQ ID NO:3, SEQ ID NO:5, SEQ ID NO:7, SEQ ID NO:9, SEQ ID NO: 11, SEQ ID NO:13, SEQ ID NO:15, SEQ ID NO:17, SEQ ID NO:19, SEQ ID NO:21, SEQ ID NO:23, SEQ ID NO:25, SEQ ID NO:27, SEQ ID NO:29, SEQ ID NO:31, SEQ ID NO:33, SEQ ID NO:35, SEQ ID NO:275, SEQ ID NO:277, SEQ ID NO:279, SEQ ID NO:281, SEQ ID NO:321, SEQ ID NO:323, and SEQ ID NO:325.

[0438] In some embodiments, the nucleic acid sequence that encodes a bicistronic iCAR/aCAR exhibits at least 99% sequence identity to a nucleic acid sequence selected from the group consisting of SEQ ID NO:1, SEQ ID NO:3, SEQ ID NO:5, SEQ ID NO:7, SEQ ID NO:9, SEQ ID NO: 11, SEQ ID NO:13, SEQ ID NO:15, SEQ ID NO:17, SEQ ID NO:19, SEQ ID NO:21, SEQ ID NO:23, SEQ ID NO:25, SEQ ID NO:27, SEQ ID NO:29, SEQ ID NO:31, SEQ ID NO:33, SEQ ID NO:35, SEQ ID NO:275, SEQ ID NO:277, SEQ ID NO:279, SEQ ID NO:281, SEQ ID NO:321, SEQ ID NO:323, and SEQ ID NO:325.

[0439] In some embodiments, the nucleic acid sequence that encodes a bicistronic iCAR/aCAR exhibits 100% sequence identity to a nucleic acid sequence selected from the group consisting of SEQ ID NO:1, SEQ ID NO:3, SEQ ID NO:5, SEQ ID NO:7, SEQ ID NO:9, SEQ ID NO: 11, SEQ ID NO:13, SEQ ID NO:15, SEQ ID NO:17, SEQ ID NO:19, SEQ ID NO:21, SEQ ID NO:23, SEQ ID NO:25, SEQ ID NO:27, SEQ ID NO:29, SEQ ID NO:31, SEQ ID NO:33, SEQ ID NO:35, SEQ ID NO:275, SEQ ID NO:277, SEQ ID NO:279, SEQ ID NO:281, SEQ ID NO:321, SEQ ID NO:323, and SEQ ID NO:325.

[0440] As used herein, sequence identity can include the identity/similarity between two or more nucleic acid sequences, or two or more amino acid sequences, is expressed in terms of the identity or similarity between the sequences. Sequence identity can be measured in terms of percentage identity; the higher the percentage, the more identical the sequences are. Sequence similarity can be measured in terms of percentage similarity (which takes into account conservative amino acid substitutions); the higher the percentage, the more similar the sequences are. Homologs or orthologs of nucleic acid or amino acid sequences possess a relatively high degree of sequence identity/similarity when aligned using standard methods. Methods of alignment of sequences for comparison are well known in the art. Various programs and alignment algorithms are described in, for example but not limited to Smith & Waterman, Adv. Appl. Math. 2:482, 1981; Needleman & Wunsch, J. Mol. Biol. 48:443, 1970; Pearson & Lipman, Proc. Natl. Acad. Sci. USA 85:2444, 1988; Higgins & Sharp, Gene, 73:237-44, 1988; Higgins & Sharp, CABIOS 5:151-3, 1989; Corpet et al., Nuc. Acids Res. 16:10881-90, 1988; Huang et al. Computer Appls. in the Biosciences 8, 155-65, 1992; and Pearson et al., Meth. Mol. Bio. 24:307-31, 1994. Altschul et al., J. Mol. Biol. 215:403-10, 1990, presents a detailed consideration of sequence alignment methods and homology calculations. The NCBI Basic Local Alignment Search Tool (BLAST) (Altschul et al., J. Mol. Biol. 215:403-10, 1990) is available from several sources, including the National Center for Biological Information (NCBI, National Library of Medicine, Building 38A, Room 8N805, Bethesda, Md. 20894) and on the Internet, for use in connection with the sequence analysis programs blastp, blastn, blastx, tblastn and tblastx. Additional information can be found at the NCBI web site. For example, BLASTN can be used to compare nucleic acid sequences, while BLASTP can be used to compare amino acid sequences. To compare two nucleic acid sequences, the options can be set as follows: -i is set to a file containing the first nucleic acid sequence to be compared (such as C:\seq1.txt); --j is set to a file containing the second nucleic acid sequence to be compared (such as C:\seq2.txt); --p is set to blastn; --o is set to any desired file name (such as C:\output.txt); --q is set to --1; --r is set to 2; and all other options are left at their default setting. For example, the following command can be used to generate an output file containing a comparison between two sequences: C:\B12seq --i c:\seq1.txt --j c:\seq2.txt --p blastn --o c:\output.txt --q --1 --r 2.

[0441] IV. Construction of Effector Cells

[0442] In still another aspect, the present invention provides a method for preparing a safe effector immune cell comprising: (i) transfecting an effector immune cell directed to a tumor-associated antigen with a nucleic acid molecule comprising a nucleotide sequence encoding a bicistronic iCAR/aCAR construct or monocistronic aCAR and iCAR constructs for co-transduction as defined herein above or transducing the cells with a vector or (ii) transfecting a naïve effector immune cell with a nucleic acid molecule comprising a nucleotide sequence encoding a bicistronic iCAR/aCAR construct as defined herein above; or transducing an effector immune cell with a vector as defined herein above. In some embodiments, the bicistronic iCAR/aCAR construct is encoded a single vector.

[0443] In still another aspect, the present invention provides a method for preparing a safe effector immune cell comprising: (i) transfecting a TCR-engineered effector immune cell directed to a tumor-associated antigen with a nucleic acid molecule comprising a nucleotide sequence encoding a bicistronic iCAR/aCAR construct or monocistronic aCAR and iCAR constructs for co-transduction as defined herein above or transducing the cells with a vector or (ii) transfecting a naïve effector immune cell with a nucleic acid molecule comprising a nucleotide sequence encoding a bicistronic iCAR/aCAR construct as defined herein above; or transducing an effector immune cell with a vector as defined herein above. In some embodiments, the bicistronic iCAR/aCAR construct is encoded a single vector. In some embodiments, the bicistronic iCAR and aCAR constructs are encoded on different/separate vectors. In some embodiments, the monocistronic aCAR and iCAR constructs for co-transduction are encoded on a single vector. In some embodiments, the monocistronic aCAR and iCAR constructs for co-transduction are encoded on different/separate vectors.

[0444] In some embodiments, the immune cell for use in engineering includes but is not limited to a T-cell, a natural killer cell, or a cytokine-induced killer cell. In some embodiments, the immune cell for use in engineering includes but is not limited to a Jurkat T-cell, a Jurkat-NFAT T-cell, and/or a peripheral blood mononuclear cell (PBMC).

[0445] In some embodiments, the immune cell is modified such that is a safe effector immune cell. In yet another aspect, the present invention provides a safe effector immune cell obtained by the method of the present invention as described above. The safe effector immune cell may be a redirected T cell expressing an exogenous T cell receptor (TCR) and a bicistronic iCAR/aCAR construct or monocistronic aCAR and iCAR constructs for co-transduction, wherein the exogenous TCR is directed to a non-polymorphic cell surface epitope of an antigen or a single allelic variant of a polymorphic cell surface epitope, wherein said epitope is a tumor-associated antigen or is shared at least by cells of related tumor and normal tissue, and a bicistronic iCAR/aCAR construct or monocistronic aCAR and iCAR constructs for co-transduction is as defined above; or the safe effector immune cell is a redirected effector immune cell such as a natural killer cell or a T cell expressing a bicistronic iCAR/aCAR construct or monocistronic aCAR and iCAR constructs for co-transduction as defined above.

[0446] In some embodiments, the safe effector immune cell expresses on its surface an aCAR comprising an extracellular domain that specifically binds to a non-polymorphic cell surface epitope of an antigen and an iCAR comprising an extracellular domain that specifically binds a single allelic variant of a polymorphic cell surface epitope of a different antigen to which the extracellular domain of said aCAR binds. In some embodiments, the extracellular domain of the iCAR specifically binds a single allelic variant of a different polymorphic cell surface epitope are of the same antigen to which the extracellular domain of said aCAR binds; or the extracellular domain of the iCAR specifically binds a different single allelic variant of the same polymorphic cell surface epitope area to which the extracellular domain of said aCAR binds.

[0447] In some embodiments, the aCAR and the iCAR are present on the cell surface as separate proteins. In some embodiments, the expression level on the cell surface of the iCAR is greater than or equal to the expression level of the aCAR. In some embodiments, the extracellular domain of the iCAR expressed on the cell surface is directed against or specifically binds to a single allelic variant of an at least one extracellular polymorphic epitope.

[0448] In some embodiments, the extracellular domain of the iCAR expressed on the cell surface is directed against or specifically binds to a single allelic variant of HLA-A2. In some embodiments, the iCAR will be directed toward HLA-A2. In some embodiments, the aCAR with be directed toward EGFR. In some embodiments, the aCAR with be directed toward HER2. In some embodiments, the iCAR/aCAR set will be HLA-A2 and EGFR respectively. In some embodiments, the iCAR/aCAR set will be HLA-A2 and HER2 respectively.

[0449] In some embodiments, the safe effector immune cell comprises a bicistronic iCAR/aCAR nucleic acid sequence selected from the group consisting of SEQ ID NO:1, SEQ ID NO:3, SEQ ID NO:5, SEQ ID NO:7, SEQ ID NO:9, SEQ ID NO: 11, SEQ ID NO:13, SEQ ID NO:15, SEQ ID NO:17, SEQ ID NO:19, SEQ ID NO:21, SEQ ID NO:23, SEQ ID NO:25, SEQ ID NO:27, SEQ ID NO:29, SEQ ID NO:31, SEQ ID NO:33, SEQ ID NO:35, SEQ ID NO:275, SEQ ID NO:277, SEQ ID NO:279, SEQ ID NO:281, SEQ ID NO:321, SEQ ID NO:323, and SEQ ID NO:325.

[0450] In some embodiments, the safe effector immune cell comprises and expression vector comprising a bicistronic iCAR/aCAR nucleic acid sequence selected from the group consisting of SEQ ID NO:1, SEQ ID NO:3, SEQ ID NO:5, SEQ ID NO:7, SEQ ID NO:9, SEQ ID NO:11, SEQ ID NO:13, SEQ ID NO:15, SEQ ID NO:17, SEQ ID NO:19, SEQ ID NO:21, SEQ ID NO:23, SEQ ID NO:25, SEQ ID NO:27, SEQ ID NO:29, SEQ ID NO:31, SEQ ID NO:33, SEQ ID NO:35, SEQ ID NO:275, SEQ ID NO:277, SEQ ID NO:279, SEQ ID NO:281, SEQ ID NO:321, SEQ ID NO:323, and SEQ ID NO:325.

[0451] In some embodiments, the safe effector immune cell comprises a bicistronic iCAR/aCAR nucleic acid that encodes an amino acid sequence selected from the group consisting of SEQ ID NO:2, SEQ ID NO:4, SEQ ID NO:6, SEQ ID NO:8, SEQ ID NO:10, SEQ ID NO:12, SEQ ID NO:14, SEQ ID NO:16, SEQ ID NO:18, SEQ ID NO:20, SEQ ID NO:22, SEQ ID NO:24, SEQ ID NO:26, SEQ ID NO:28, SEQ ID NO:30, SEQ ID NO:32, SEQ ID NO:34, SEQ ID NO:36, SEQ ID NO:276, SEQ ID NO:278, SEQ ID NO:280, SEQ ID NO:282, SEQ ID NO:322, SEQ ID NO:324, and SEQ ID NO:326.

[0452] In some embodiments, the safe effector immune cell comprises expression vector comprises a bicistronic iCAR/aCAR nucleic acid that encodes an amino acid sequence selected from the group consisting of SEQ ID NO:2, SEQ ID NO:4, SEQ ID NO:6, SEQ ID NO:8, SEQ ID NO:10, SEQ ID NO:12, SEQ ID NO:14, SEQ ID NO:16, SEQ ID NO:18, SEQ ID NO:20, SEQ ID NO:22, SEQ ID NO:24, SEQ ID NO:26, SEQ ID NO:28, SEQ ID NO:30, SEQ ID NO:32, SEQ ID NO:34, SEQ ID NO:36, SEQ ID NO:276, SEQ ID NO:278, SEQ ID NO:280, SEQ ID NO:282, SEQ ID NO:322, SEQ ID NO:324, and SEQ ID NO:326.

[0453] In some embodiments, EGFR is the aCAR target and HLA is the iCAR target. In some embodiments, HER2 is the aCAR target and HLA is the iCAR target. In some embodiments, the safe effector immune cells used for treating cancer as defined comprises an expression vector. In some embodiments, the iCAR and aCAR are encoded by a bicistronic nucleic acid based expression vector. In some embodiments, the expression vector comprises a nucleic acid sequence a sequence selected from the group consisting of SEQ ID NO:1, SEQ ID NO:3, SEQ ID NO:5, SEQ ID NO:7, SEQ ID NO:9, SEQ ID NO: 11, SEQ ID NO:13, SEQ ID NO:15, SEQ ID NO:17, SEQ ID NO:19, SEQ ID NO:21, SEQ ID NO:23, SEQ ID NO:25, SEQ ID NO:27, SEQ ID NO:29, SEQ ID NO:31, SEQ ID NO:33, SEQ ID NO:3, SEQ ID NO:275, SEQ ID NO:277, SEQ ID NO:279, SEQ ID NO:281, SEQ ID NO:321, SEQ ID NO:323, and SEQ ID NO:325. In some embodiments, the expression vector comprises a nucleic acid sequence that codes for an amino sequence selected from the group consisting of SEQ ID NO:2, SEQ ID NO:4, SEQ ID NO:6, SEQ ID NO:8, SEQ ID NO:10, SEQ ID NO:12, SEQ ID NO:14, SEQ ID NO:16, SEQ ID NO:18, SEQ ID NO:20, SEQ ID NO:22, SEQ ID NO:24, SEQ ID NO:26, SEQ ID NO:28, SEQ ID NO:30, SEQ ID NO:32, SEQ ID NO:34, SEQ ID NO:36, SEQ ID NO:276, SEQ ID NO:278, SEQ ID NO:280, SEQ ID NO:282, SEQ ID NO:322, SEQ ID NO:324, and SEQ ID NO:326.

[0454] In some embodiments, the safe effector immune cells used for treating cancer comprises an expression vector that comprises a bicistronic iCAR/aCAR nucleic acid sequence selected from the group consisting of SEQ ID NO:1, SEQ ID NO:3, SEQ ID NO:5, SEQ ID NO:7, SEQ ID NO:9, SEQ ID NO: 11, SEQ ID NO:13, SEQ ID NO:15, SEQ ID NO:17, SEQ ID NO:19, SEQ ID NO:21, SEQ ID NO:23, SEQ ID NO:25, SEQ ID NO:27, SEQ ID NO:29, SEQ ID NO:31, SEQ ID NO:33, SEQ ID NO:35, SEQ ID NO:275, SEQ ID NO:277, SEQ ID NO:279, SEQ ID NO:281, SEQ ID NO:321, SEQ ID NO:323, and SEQ ID NO:325.

[0455] In some embodiments, the safe effector immune cells used for treating cancer comprises a bicistronic iCAR/aCAR nucleic acid sequence selected from the group consisting of SEQ ID NO:1, SEQ ID NO:3, SEQ ID NO:5, SEQ ID NO:7, SEQ ID NO:9, SEQ ID NO:11, SEQ ID NO:13, SEQ ID NO:15, SEQ ID NO:17, SEQ ID NO:19, SEQ ID NO:21, SEQ ID NO:23, SEQ ID NO:25, SEQ ID NO:27, SEQ ID NO:29, SEQ ID NO:31, SEQ ID NO:33, SEQ ID NO:35, SEQ ID NO:275, SEQ ID NO:277, SEQ ID NO:279, SEQ ID NO:281, SEQ ID NO:321, SEQ ID NO:323, and SEQ ID NO:325.

[0456] In some embodiments, the safe effector immune cells used for treating cancer as comprises a bicistronic iCAR/aCAR nucleic acid that encodes an amino acid sequence selected from the group consisting of SEQ ID NO:2, SEQ ID NO:4, SEQ ID NO:6, SEQ ID NO:8, SEQ ID NO:10, SEQ ID NO:12, SEQ ID NO:14, SEQ ID NO:16, SEQ ID NO:18, SEQ ID NO:20, SEQ ID NO:22, SEQ ID NO:24, SEQ ID NO:26, SEQ ID NO:28, SEQ ID NO:30, SEQ ID NO:32, SEQ ID NO:34, SEQ ID NO:36, SEQ ID NO:276, SEQ ID NO:278, SEQ ID NO:280, SEQ ID NO:282, SEQ ID NO:322, SEQ ID NO:324, and SEQ ID NO:326.

[0457] In some embodiments, the safe effector immune cells used for treating cancer as comprises an expression vector that comprises a bicistronic iCAR/aCAR nucleic acid that encodes an amino acid sequence selected from the group consisting of SEQ ID NO:2, SEQ ID NO:4, SEQ ID NO:6, SEQ ID NO:8, SEQ ID NO:10, SEQ ID NO:12, SEQ ID NO:14, SEQ ID NO:16, SEQ ID NO:18, SEQ ID NO:20, SEQ ID NO:22, SEQ ID NO:24, SEQ ID NO:26, SEQ ID NO:28, SEQ ID NO:30, SEQ ID NO:32, SEQ ID NO:34, SEQ ID NO:36, SEQ ID NO:276, SEQ ID NO:278, SEQ ID NO:280, SEQ ID NO:282, SEQ ID NO:322, SEQ ID NO:324, and SEQ ID NO:326.

[0458] A. In Vitro Assays

[0459] In some embodiments, the bicistronic iCAR/aCAR constructs will be tested for activity effects, including effectiveness and ability to inhibit, using a variety of assays. In some embodiments, the bicistronic iCAR/aCAR constructs or monocistronic aCAR and iCAR constructs for co-transduction will be tested in-vitro and/or in-vivo. In some embodiments, the bicistronic iCAR/aCAR constructs or monocistronic aCAR and iCAR constructs for co-transduction will be tested in-vitro. In some embodiments, the bicistronic iCAR/aCAR constructs or monocistronic aCAR and iCAR constructs for co-transduction will be tested in-vivo. In some embodiments, the in vitro assays measure cytokine secretion and/or cytotoxicity effects. In some embodiments, the in vivo assays will evaluate the bicistronic iCAR/aCAR constructs or monocistronic aCAR and iCAR constructs for co-transduction inhibition and protection to on-target off tumor xenografts. In some embodiments, the in vivo assays will evaluate the bicistronic iCAR/aCAR constructs or monocistronic aCAR and iCAR constructs for co-transduction inhibition and protection to on-target off tumor tissue and/or viral organs.

[0460] i. Luciferase Cytotoxicity Assay

[0461] In some embodiments, bicistronic iCAR/aCAR constructs or monocistronic aCAR and iCAR constructs for co-transduction are evaluated using a luciferase cytotoxicity assay. Generally, for a luciferase cytotoxic assay, target tumor cells (which can be referred to as “T”) are engineered to express firefly luciferase. In some embodiments, commercially available ATCC cell lines are used. In some embodiments, H1703 cells were used. In some embodiments, H1650 cells were used. In some embodiments, H1792 cells were used. In some embodiments, H292 cells were used. The in vitro luciferase assay can be performed according to the Bright-Glo Luciferase assay (commercially available from Promega or BPS Biosciences or other commercial vendors). Transduced effector (E) T cells (which have been transduced with bicistronic iCAR/aCAR constructs or mock/control construct) can be incubated for 18-48 hrs with recombinant target cells expressing the iCAR or aCAR target to be tested in different effector to target ratios. In some embodiments, the iCAR/aCAR pair comprises any of aCAR and/or iCAR with the components as described above. In some embodiments, the bicistronic iCAR/aCAR constructs described above are to be tested. In some embodiments, the bicistronic iCAR/aCAR comprises an amino acid sequence encoded by a nucleic acid sequence selected from the group consisting of SEQ ID NO:1, SEQ ID NO:3, SEQ ID NO:5, SEQ ID NO:7, SEQ ID NO:9, SEQ ID NO: 11, SEQ ID NO:13, SEQ ID NO:15, SEQ ID NO:17, SEQ ID NO:19, SEQ ID NO:21, SEQ ID NO:23, SEQ ID NO:25, SEQ ID NO:27, SEQ ID NO:29, SEQ ID NO:31, SEQ ID NO:33, SEQ ID NO:35, SEQ ID NO:275, SEQ ID NO:277, SEQ ID NO:279, SEQ ID NO:281, SEQ ID NO:321, SEQ ID NO:323, and SEQ ID NO:325. In some embodiments, the bicistronic iCAR/aCAR comprises an amino acid sequence selected from the group consisting of SEQ ID NO:2, SEQ ID NO:4, SEQ ID NO:6, SEQ ID NO:8, SEQ ID NO:10, SEQ ID NO:12, SEQ ID NO:14, SEQ ID NO:16, SEQ ID NO:18, SEQ ID NO:20, SEQ ID NO:22, SEQ ID NO:24, SEQ ID NO:26, SEQ ID NO:28, SEQ ID NO:30, SEQ ID NO:32, SEQ ID NO:34, SEQ ID NO:36, SEQ ID NO:276, SEQ ID NO:278, SEQ ID NO:280, SEQ ID NO:282, SEQ ID NO:322, SEQ ID NO:324, and SEQ ID NO:326. Cell killing can be quantified indirectly by estimating the number of live cells with the Bright-Glo Luciferase system. Cell killing can also be measured using an IncuCyte cytotoxicity assay.

[0462] In some embodiments, the ‘off-tumor’ cytotoxicity can be manipulated by sorting transduced T cell populations according to iCAR/aCAR expression level or by selecting a sub population of recombinant target cells according to their target expression, including for example, expression of the gene product encoding for at least one extracellular polymorphic epitope. In some embodiments, the aCAR and iCAR target is any target with an extracellular domain. In some embodiments, the sorting is based on EGFR, HER2, or HLA-A2 expression level.

[0463] In some embodiments, the bicistronic iCAR/aCAR construct or monocistronic aCAR and iCAR constructs for co-transduction is examined to determine whether the iCAR transduced T cells can discriminate between the ‘on-tumor’ cells (e.g., tumor cells) and ‘off-tumor’ cells (e.g., non-tumor cells) in vitro. Generally, this is tested by examining the killing effect of transduced T cells incubated with a mix of ‘on-tumor’ and ‘off-tumor’ cells at a ratio of 1:1 to 1:10. In some embodiments, the ratio Target cells to Effector T cells (T:E ratio) is 1:0.02, 1:0.04, 1:0.06, 1:0.08, 1:0.1, 1:0.12, 1:0.12, 1:0.14, 1:0.16, 1:0.18, 1:2, 1:3, 1:4, 1:5, 1:6, 1:7, 1:8, 1:9, 1:10, 1:11, 1:12, 1:13, 1:14, 1:15, 1:16, 1:17, 1:18, 1:19, or 1:20. In some embodiments, the E:T ratio (Effector T cells to Target cells) is 0.02:1, 0.04:1, 0.06:1, 0.08:1, 0.1:1, 0.12:1, 0.12:1, 0.14:1, 0.16:1, 0.18:1, 2:1, 3:1, 4:1, 5:1:1, 6:1, 7:1, 8:1, 9:1, 10:1, 11:1, 12:1, 13:1, 14:1, 15:1, 16:1, 17:1, 18:1, 19:1, or 20:1. The on tumor recombinant cells can be distinguished from the ‘off-tumor’ recombinant cells by luciferase expression in embodiments where only one cell population will be engineered to express the luciferase gene at a time). Killing can be quantified after 24-48 hrs of co-incubation using the Bright-Glo Luciferase assay (Promega). Killing can also be quantified using an IncCyte cytotoxicity assay. In some embodiments, transduced cells were only used in the assay of transduction efficiency was greater than 10% and expression was observed for both aCAR and iCAR.

[0464] In some embodiments, the bicistronic iCAR/aCAR construct or monocistronic aCAR and iCAR constructs for co-transduction transduced T cells exhibit about 10%, about 20%, about 30%, about 40%, about 50%, about 60%, about 70%, about 80%, about 90%, and/or about 95% less off-tumor cell killing as compared to T cells transduced with aCAR (or other control) but not transduced with the bicistronic iCAR/aCAR construct or monocistronic aCAR and iCAR constructs for co-transduction. In some embodiments, the bicistronic iCAR/aCAR construct or monocistronic aCAR and iCAR constructs for co-transduction transduced T cells exhibit about 1-fold, about 2-fold, about 3-fold, about 4-fold, about 5-fold, or about 10-fold less off-tumor cell killing as compared to T cells transduced with aCAR (or other control) but not transduced with the bicistronic iCAR/aCAR construct.

[0465] ii. Caspase 3

[0466] In some embodiments, caspase 3-detection assays are employed to determine the level of apoptosis of the ‘on-tumor’ cells (e.g., tumor cells) and ‘off-tumor’ cells (e.g., non-tumor cells) in vitro. In some embodiments, caspase 3-detection of cytotoxic lymphocyte (CTL) induced apoptosis by an antibody to activated cleaved caspase 3 is examined.

[0467] Generally, one of the pathways by which CTLs kill target cells is by inducing apoptosis through the Fas ligand. The CASP3 protein is a member of the cysteine-aspartic acid protease (caspase) family. Typically, sequential activation of caspases plays a significant role in the execution-phase of cell apoptosis and as such, cleavage of pro-caspase 3 to caspase 3 results in conformational change and expression of catalytic activity. The cleaved activated form of caspase 3 can be recognized specifically by a monoclonal antibody.

[0468] In some embodiments, transduced T cells can be incubated with either ‘on-tumor’ (e.g., mimicking tumor) and ‘off-tumor’ cells (e.g., mimicking non-tumor) recombinant cells. In some embodiments, the ‘on-tumor’ (e.g., tumor) and ‘off-tumor’ cells (e.g., non-tumor) recombinant cells have been previously labeled with CFSE ((5(6)-Carboxyfluorescein N-hydroxysuccinimidyl ester)) or other cell tracer dye (e.g., CellTrace Violet). In some embodiments, co-incubation of target cells with effector cells occurs for about 1 hour to 6 about hours, about 2 hours to about 5 hours, or about 2 to about 4 hrs. In some embodiments, target cell apoptosis is quantified by flow cytometry. Cells can be permeabilized and fixed by an inside staining kit (Miltenyi or BD bioscience) and stained with an antibody for activated caspase 3 (BD bioscience).

[0469] In some embodiments, the bicistronic iCAR/aCAR construct transduced T cells induce about 10%, about 20%, about 30%, about 40%, about 50%, about 60%, about 70%, about 80%, about 90%, and/or about 95% less off-tumor cell apoptosis as compared to T cells transduced with the bicistronic iCAR/aCAR construct but not transduced with the iCAR (or other appropriate control). In some embodiments, the bicistronic iCAR/aCAR construct transduced T cells induce about 1-fold, about 2-fold, about 3-fold, about 4-fold, about 5-fold, or about 10-fold less off-tumor cell apoptosis as compared to T cells transduced with aCAR (or other control) but not transduced with the bicistronic iCAR/aCAR construct.

[0470] iii. Time-Lapse Microscopy

[0471] Time lapse microscopy of the bicistronic iCAR/aCAR construct or monocistronic aCAR and iCAR constructs for co-transduction transduced T cells can be employed in order to discern target binding. In some embodiments, target cells will be labeled with a reporter gene (for example but not limited to a fluorescent protein such as mCherry). In some embodiments, transduced T cells are incubated with either ‘on-tumor’ or ‘off-tumor’ cells for up to 5 days. In some embodiments, time lapse microscopy can be used to visualize killing. In some embodiments, flow cytometry analysis using viable cell number staining and CountBright™ beads (commercially available from Thermofisher/Invitrogen) for determining target cell number at end-point time will be conducted.

[0472] In some embodiments, in order to determine if the bicistronic iCAR/aCAR construct or monocistronic aCAR and iCAR constructs for co-transduction transduced T cells can discern targets in vitro, each recombinant target cells (‘on-tumor’ or ‘off-tumor’) is labeled with a different reporter protein (for example GFP and mCherry). In some embodiments, any report protein pair would work, so long as the reporter pair contains two reporters which are easily distinguishable. In some embodiments, transduced T cells (Effector cells) will be co-incubated with the recombinant cells (target cells) at a 1:1 ratio of E/T. In some embodiments, the ration of effector to target (E/T) includes but is not limited to 16:1, 15:1, 14:1, 13:1, 12:1, 11:1, 10:1, 9:1, 8:1, 6:1, 4:1, 2:1, or 1:1. In some embodiments, the cell fate is then examined by microscopy imaging.

[0473] iv. Cytokine Expression Intra Cellular Staining

[0474] Cytokine expression and/or release can be examined in order to determine T cells activation. In some embodiments, a bicistronic iCAR/aCAR construct transduced T cells are incubated with the recombinant target cells and cytokine production for one or more cytokines is quantified, for example, either by measuring cytokine secretion in cell culture supernatant according to or by flow cytometry analysis, or by Luminex and/or MSD. For the flow cytometry analysis, a Golgi stop can be employed to prevent the secretion of the cytokines. In some embodiments, following a 6 hour and 18 hour to 24 hour incubation of the transduced T cells with target cells, T cells will be permeabilized and fixed by an intracellular staining kit (Miltenyi) and stained with antibodies for the T cell markers (CD3 and CD8) and for one or more cytokines. In some embodiments, the cytokines include but are not limited to IL-2, INFγ, and/or TNFα. In some embodiments, the cytokines are secreted and include but are not limited to IL-2, INFγ, and/or TNFα. In some embodiments, the cytokines are intracellular and include but are not limited to IL-2, INFγ, and/or TNFα.

[0475] v. T Cell Degranulation Assay Measured by CD107a Staining

[0476] Staining for CD107a can also be examined as a surrogate for cytolytic activity of the transduced T cells. Generally, degranulating of T cells can be identified by the surface expression of CD107a, a lysosomal associated membrane protein (LAMP-1), and surface expression of LAMP-1 has been shown to correlate with CD8 T cell cytotoxicity. Further, this molecule is located on the luminal side of lysosomes. Typically, upon activation, CD107a is transferred to the cell membrane surface of activated lymphocytes. Moreover, CD107a is expressed on the cell surface transiently and is rapidly re-internalized via the endocytic pathway. Therefore, while not being bound by theory, CD107a detection is maximized by antibody staining during cell stimulation and by the addition of monensin (for example, to prevent acidification and subsequent degradation of endocytosed CD107a antibody complexes).

[0477] In some embodiments, the bicistronic iCAR/aCAR construct transduced T cells are incubated with the target cells for about 6 hours to about 24 hours and CD107a expression on the CD8 T cells is examined. In some embodiments, the target cells expresso only one target protein recognized by aCAR (as in tumor cells) or target cells expressing both target proteins recognized by aCAR and iCAR (as in normal cells). In some embodiments, the bicistronic iCAR/aCAR construct transduced T cells are incubated with the target cells for about 6 ours to about 24 hrs in the presence of monensin and CD107a expression on the CD8 T cells is followed by flow cytometry using conjugated antibodies against the T cell surface markers (for example, CD3 and CD8) and a conjugated antibody for CD107a.

[0478] vi. Quantitation of Secreted Cytokines by ELISA/Luminex

[0479] In some embodiments, following co-cultivation of bicistronic iCAR/aCAR construct transduced T-cells (Jurkat, or primary T-cells) expressing iCAR or aCAR or both aCAR and iCAR with modified target cells, expressing iCAR or aCAR or both aCAR and iCAR antigens on their cell surface, conditioned medium will be collected, and cytokine's concentration will be measured by cytokine ELISA or by Luminex xMAP Multiplex Assay technology (Luminex). In some embodiments, the cytokine is selected from the group consisting of IL-2, INFγ and/or TNF□. In some embodiments, the cytokine is selected from the group consisting of IL-2. In some embodiments, the cytokine is selected from the group consisting of INFγ. In some embodiments, the cytokine is selected from the group consisting of TNF□. In some embodiments, a decrease of about 20%, about 25%, about 30%, about 35%, about 40%, about 45%, about 50%, about 55%, about 60%, about 65%, about 70%, about 75%, about 80%, about 85%, about 90%, about 95%, or about 99% is demonstrated with bicistronic iCAR/aCAR construct transduced cells.

[0480] vii. Cytokines Secretion Measured by Cytometric Bead Array (CBA) Assay

[0481] Cytometric Bead Array (CBA) is used to measure a variety of soluble and intracellular proteins, including cytokines, chemokines and growth factors. In some embodiments, T-cells (primary T-cells or Jurkat cells) transduced with aCAR or both aCAR and iCAR constructs (Effector cells) are stimulated with modified target cells expressing both iCAR and aCAR or aCAR or iCAR target antigens on their cell surface. In some embodiments, the effector to target ratio ranges from 20:1 up to 1:1. In some embodiments, the effector to target ratio ranges from 20:1, 19:1, 18:1, 17:1, 16:1, 15:1, 14:1, 13:1, 12:1, 11:1, 10:1, 9:1, 8:1, 7:1, 6:1, 5:1, 4:1, 3:1, 2:1, or 1:1. In some embodiments, following several hours of co-incubation the effector cells produce and secrete cytokines which indicate their effector state. In some embodiments, the supernatant of the reaction is collected, and secreted IL-2, IFN-γ, and/or TNFα were measured and quantified by multiplex CBA assay.

[0482] In some embodiments, a decrease of about 20%, about 25%, about 30%, about 35%, about 40%, about 45%, about 50%, about 55%, about 60%, about 65%, about 70%, about 75%, about 80%, about 85%, about 90%, about 95%, or about 99% is demonstrated with dual CAR (aCAR/iCAR) transduced cells were co-incubated with target cells expressing both target antigens as compared to IL-2, IFN-γ, and/or TNFα secretion resulted from co-incubation of the same effector cells with target cells expressing only one target. In some embodiments, a decrease of about 20%, about 25%, about 30%, about 35%, about 40%, about 45%, about 50%, about 55%, about 60%, about 65%, about 70%, about 75%, about 80%, about 85%, about 90%, about 95%, or about 99% in IL-2 IFN-γ, and/or TNFα secretion was demonstrated when bicistronic iCAR/aCAR construct transduced cells were co-incubated with target cells expressing both target antigens as compared to IL-2 IFN-γ, and/or TNFα secretion resulted from co-incubation of the same effector cells with target cells expressing only one target. In some embodiments, a decrease of 86%.

[0483] B. In Vivo Assays

[0484] In some embodiments, the bicistronic iCAR/aCAR construct are tested for effectiveness in vivo. In some embodiments, NOD/SCID/γc- or similar mice are inoculated subcutaneously or orthotopically with tumor cells. In some embodiments, the tumor cells are EGFR and HER2 positive cells lines A549, A431, Fadu, SK-OV-3, U-87, MCF7, NCI-H460, NCI-H1703, NCI-H1650, NCI-H1975, NCI-H292 (ATCC cell lines) cells. In some embodiments, for establishment of and/or differentiation between ‘on-target’ cells and ‘off-tumor’ cells, A549, A431, Fadu, SK-OV-3, U-87, MCF7, NCI-H460 NCI-H1703, NCI-H1650, NCI-H1975, NCI-H292 can be engineered to be deficient or express the iCAR epitope, thereby representing the healthy cells. In some embodiments, the iCAR epitope comprises at least one extracellular polymorphic epitope. In some embodiments, the iCAR epitope is from HLA (including, for example, HLA-A2, HLA-A3, HLA-A, HLA-B, HLA-C, HLA-G, HLA-E, HLA-F, HLA-DPA1, HLA-DQA1, HLA-DQB1, HLA-DQB2, HLA-DRB1, or HLA-DRB5). In some embodiments, the iCAR epitope is from HLA-A2. Other cells that could be employed in these assays include but are not limited to Raji or any other recombinant cell lines. In some embodiments, such assays can be in a PDX (patient derived xenograft) model.

[0485] For the assay, mice will be divided into study groups; one cohort will be injected with the A549, A431, Fadu, SK-OV-3, U-87, MCF7, NCI-H460 NCI-H1703, NCI-H1650, NCI-H1975, and/or NCI-H292 cells not expressing the iCAR epitope, while the other will be injected with the corresponding A549, A431, Fadu, SK-OV-3, U-87, MCF7, NCI-H460 NCI-H1703, NCI-H1650, NCI-H1975, NCI-H292 cells expressing the iCAR epitope. Following staging, mice will be infused intravenously with T cells transduced with aCAR, aCAR/iCAR and a control group of untransduced T cells or no T cells. Tumor burden will be measured by through measurement of the subcutaneous tumor volume.

[0486] According to one embodiment of the assay, in order to test whether the T cells expressing the bicistronic iCAR/aCAR constructs could discriminate between the target cells and off target cells in vivo within the same organism, mice are injected with a 1:1 mixture of the ‘on-tumor’/‘off-tumor A549, A431, Fadu, SK-OV-3, U-87, MCF7, NCI-H460 NCI-H1703, NCI-H1650, NCI-H1975, and/or NCI-H292 cells, followed by injection of transduced T cells expressing either the aCAR alone or both aCAR and iCAR (including as the bicistronic iCAR/aCAR constructs as described herein) after staging. With this embodiment, upon sacrifice of the mice the presence of the ‘on-tumor’ and ‘off-tumor cells Will be evaluated by immunohistochemical staining

[0487] According to one embodiment of the assay, in order to test whether the T cells expressing the bicistronic iCAR/aCAR constructs could discriminate between the target cells and off target cells in vivo within the same organism, mice are injected with a 1:10 mixture of the ‘on-tumor’/‘off-tumor NALM-6, A549, A431, Fadu, SK-OV-3, U-87, MCF7, and/or NCI-H460 NCI-H1703, NCI-H1650, NCI-H1975, NCI-H292 cells, followed by injection of transduced T cells expressing either the aCAR alone or both aCAR and iCAR. With this embodiment, upon sacrifice of the mice the presence of the ‘on-tumor’ and ‘off-tumor cells in the spleen and bone marrow will be analyzed by flow cytometry for iCAR and aCAR markers.

[0488] i. Tumor Growth Kinetics in Human Xenograft Mouse Models

[0489] In some embodiments, the tumor cells express either the iCAR target, aCAR target or both. In some embodiments, an aCAR tumor cell line could be the EGFR or HER2 positive cells lines A549, A431, Fadu, SK-OV-3 U-87, MCF7, and/or NCI-H460 (ATCC cell lines). In some embodiments, tumor cells that express both the aCAR and iCAR (i.e. ‘off-tumor’ cells) are NALM 6, A549, A431, Fadu, SK-OV-3, U-87, MCF7, MDA-MB-231, and/or NCI-H460 engineered to express the iCAR epitope (for example, HLA-A2) thereby representing the healthy cells. In some embodiments, NALM 6 and NALM 6-HLA-A2 can also be engineered to express a reporter gene (e.g., firefly luciferase, GFP, mCherry), for easy detection. In some embodiments, A549 and A549-HLA-A2 can also be engineered to express a reporter gene (e.g., firefly luciferase), for easy detection. In some embodiments, A431 and A431-HLA-A2 can also be engineered to express a reporter gene (e.g., firefly luciferase), for easy detection. In some embodiments, Fadu and Fadu-HLA-A2 can also be engineered to express a reporter gene (e.g., firefly luciferase), for easy detection. In some embodiments, SK-OV-3 and SK-OV-3-HLA-A2 can also be engineered to express a reporter gene (e.g., firefly luciferase), for easy detection. In some embodiments, NCI-H460 and NCI-H460-HLA-A2 can also be engineered to express a reporter gene (e.g., firefly luciferase), for easy detection. In some embodiments, U-87 and U-87-HLA-A2 can also be engineered to express a reporter gene (e.g., firefly luciferase), for easy detection. In some embodiments, MCF7 and MCF7-HLA-A2 can also be engineered to express a reporter gene (e.g., firefly luciferase), for easy detection. In some embodiments, can also be engineered to express a reporter gene (e.g., firefly luciferase), for easy detection. In some embodiments, NCI-H460 and NCI-H460-HLA-A2 can also be engineered to express a reporter gene (e.g., firefly luciferase), for easy detection.

[0490] In some embodiments, monitoring will be conducted by measuring tumor volume by mechanical means (caliper) and also by using in-vivo imaging systems (IVIS). In some embodiments, tumor burden can be quantified, and infiltrating T-cell populations can be analyzed by FACS.

[0491] C. Treatment Methods

[0492] The present invention provides methods for the treatment of cancers by employing the bicistronic iCAR/aCAR constructs or monocistronic aCAR and iCAR constructs for co-transduction as described herein. The methods of treatment for cancer as described herein can employ exploiting loss of heterozygosity, or other genetic loss or allelic imbalance phenotypes found in human tumors, including, without limitation, loss of function or expression, resulting from mutations affecting one or more nucleotides (for example, without limitation, in HLA-1 genes) by means of CAR-T therapy, or by modifying other cells of the immune system.

[0493] In yet another aspect, the present invention provides a method of selecting a personalized biomarker for a subject having a tumor characterized by loss of heterozygosity, or other genetic loss or allelic imbalance phenotypes found in human tumors, the method comprising (i) obtaining a tumor biopsy from the subject; (ii) obtaining a sample of normal tissue from the subject, e.g., PBMCs; (iii) identifying a single allelic variant of a polymorphic cell surface epitope that is not expressed by cells of the tumor due to loss of heterozygosity, or other genetic loss or allelic imbalance phenotypes found in human tumors, but that is expressed by the cells of the normal tissue, thereby identifying a personalized biomarker for the subject, and (iv) determining the appropriate bicistronic iCAR/aCAR construct or monocistronic aCAR and iCAR constructs for co-transduction as described herein for use in treatment.

[0494] In a further aspect, the present invention provides a method for treating cancer in a patient having a tumor characterized by loss of heterozygosity, or other genetic loss or allelic imbalance phenotypes found in human tumors, comprising administering to the patient an effector immune cell as defined above, wherein the iCAR is directed to a single allelic variant encoding a polymorphic cell surface epitope absent from cells of the tumor due to loss of heterozygosity, or other genetic loss or allelic imbalance phenotypes found in human tumors but present at least on all cells of related mammalian normal tissue of the patient. In some embodiments, the effector immune cell comprises a bicistronic iCAR/aCAR construct as described herein.

[0495] In some embodiments, the treating results in reduced on-target, off-tumor reactivity, as compared with a treatment comprising administering to the cancer patient at least one population of immune effector cells expressing a bicistronic iCAR/aCAR construct as described herein.

[0496] In some embodiments, the safe effector immune cells used for treating cancer as defined above express on their surface an aCAR comprising an extracellular domain that specifically binds to a tumor-associated antigen or a non-polymorphic cell surface epitope of an antigen and an iCAR comprising an extracellular domain that specifically binds a single allelic variant of a polymorphic cell surface epitope of an antigen expressed at least in a tissue of origin of the tumor or of a housekeeping protein, which is a different antigen than that to which the extracellular domain of said aCAR binds. In some embodiments, the effector immune cell expresses the components of a bicistronic iCAR/aCAR construct or monocistronic aCAR and iCAR constructs for co-transduction as described herein.

[0497] In some embodiments, the safe effector immune cells used for treating cancer as defined above express on their surface an aCAR comprising an extracellular domain that specifically binds to a tumor-associated antigen or a non-polymorphic cell surface epitope of an antigen and an iCAR comprising an extracellular domain that specifically binds a single allelic variant of a polymorphic cell surface epitope of an antigen expressed at least in a tissue of origin of the tumor or of a housekeeping protein, such as an HLA genes (including for example, HLA-A, HLA-B, HLA-C, HLA-G, HLA-E, HLA-F, HLA-K, HLA-L, HLA-DM, HLA-DO, HLA-DP, HLA-DQ, or HLA-DR) which is a different antigen than that to which the extracellular domain of said aCAR binds.

[0498] In some embodiments, the safe effector immune cells used for treating cancer as defined above express on their surface an aCAR comprising an extracellular domain that specifically binds to a tumor-associated antigen or a non-polymorphic cell surface epitope of an antigen and an iCAR comprising an extracellular domain that specifically binds a single allelic variant of a polymorphic cell surface epitope of an antigen expressed at least in a tissue of origin of the tumor, such as an HLA-A, which is a different antigen than that to which the extracellular domain of said aCAR binds.

[0499] In some embodiments, the safe effector immune cells used in the method of treating cancer are selected from T cells, natural killer cells or cytokine-induced killer cells. In some embodiments, the safe effector immune cell is autologous or universal (allogeneic) effector cells. In some embodiments, the iCAR used in any one of the methods of treating cancer defined above is directed to all tissues of the patient on which the target-antigen of the aCAR is present, wherein the target antigen of the aCAR is a non-polymorphic cell surface epitope of an antigen or a single allelic variant of a polymorphic cell surface epitope is present, and said epitope is a tumor-associated antigen or is shared at least by cells of related tumor and normal tissue.

[0500] In some embodiments, the cancer is selected from the group consisting of Acute Myeloid Leukemia [LAML], Adrenocortical carcinoma [ACC], Bladder Urothelial Carcinoma [BLCA], Brain Lower Grade Glioma [LGG], Breast invasive carcinoma [BRCA], Cervical squamous cell carcinoma and endocervical adenocarcinoma [CESC], Cholangiocarcinoma [CHOL], Colon adenocarcinoma [COAD], Esophageal carcinoma [ESCA], Glioblastoma multiforme [GBM], Head and Neck squamous cell carcinoma [HNSC], Kidney Chromophobe [KICH], Kidney renal clear cell carcinoma [KIRC], Kidney renal papillary cell carcinoma [KIRP], Liver hepatocellular carcinoma [LIHC], Lung adenocarcinoma [LUAD], Lung squamous cell carcinoma [LUSC], Lymphoid Neoplasm Diffuse Large B-cell Lymphoma [DLBC], Mesothelioma [MESO], Ovarian serous cystadenocarcinoma [OV], Pancreatic adenocarcinoma [PAAD], Pheochromocytoma and Paraganglioma [PCPG], Prostate adenocarcinoma [PRAD], Rectum adenocarcinoma [READ], Sarcoma [SARC], Skin Cutaneous Melanoma [SKCM], Stomach adenocarcinoma [STAD], Testicular Germ Cell Tumors [TGCT], Thymoma [THYM], Thyroid carcinoma [THCA], Uterine Carcinosarcoma [UCS], Uterine Corpus Endometrial Carcinoma [UCEC], Uveal Melanoma [UVM], Non-small cell lung carcinoma [NSCLC], and Small cell lung cancer [SCLC].

[0501] In some embodiments, the bicistronic iCAR/aCAR construct or monocistronic aCAR and iCAR constructs for co-transduction for use in the treatment of cancer is any bicistronic iCAR/aCAR construct described herein. In some embodiments, the bicistronic iCAR/aCAR construct used to treat the cancer, such as any one of the cancer types recited above, is directed against or specifically binds to a single allelic variant of an HLA genes (including for example, HLA-A, HLA-B, HLA-C, HLA-G, HLA-E, HLA-F, HLA-K, HLA-L, HLA-DM, HLA-DO, HLA-DP, HLA-DQ, or HLA-DR, HLA-B gene or HLA-C gene or against a single allelic variant. In some embodiments, the treatment method employs administration of a safe effector cell comprising the bicistronic iCAR/aCAR construct or monocistronic aCAR and iCAR constructs for co-transduction. In some embodiments, the treatment method employs administration of a safe effector cell expressing the bicistronic iCAR/aCAR construct or monocistronic aCAR and iCAR constructs for co-transduction.

[0502] In some embodiments, the bicistronic iCAR/aCAR or monocistronic aCAR and iCAR constructs for co-transduction for use in the treatment of cancer comprises an amino acid sequence encoded by a nucleic acid sequence selected from the group consisting of SEQ ID NO:1, SEQ ID NO:3, SEQ ID NO:5, SEQ ID NO:7, SEQ ID NO:9, SEQ ID NO: 11, SEQ ID NO:13, SEQ ID NO:15, SEQ ID NO:17, SEQ ID NO:19, SEQ ID NO:21, SEQ ID NO:23, SEQ ID NO:25, SEQ ID NO:27, SEQ ID NO:29, SEQ ID NO:31, SEQ ID NO:33, SEQ ID NO:35, SEQ ID NO:275, SEQ ID NO:277, SEQ ID NO:279, SEQ ID NO:281, SEQ ID NO:321, SEQ ID NO:323, and SEQ ID NO:325. In some embodiments, the bicistronic iCAR/aCAR construct or monocistronic aCAR and iCAR constructs for co-transduction comprises an amino acid sequence encoded by a nucleic acid sequence selected from the group consisting of SEQ ID NO:275, SEQ ID NO:277, SEQ ID NO:279, SEQ ID NO:281, SEQ ID NO:321, SEQ ID NO:323, and SEQ ID NO:325. In some embodiments, the treatment method employs administration of a safe effector cell comprising the bicistronic iCAR/aCAR construct or monocistronic aCAR and iCAR constructs for co-transduction. In some embodiments, the treatment method employs administration of a safe effector cell expressing the bicistronic iCAR/aCAR construct or monocistronic aCAR and iCAR constructs for co-transduction.

[0503] In some embodiments, the bicistronic iCAR/aCAR for use in the treatment of cancer comprises an amino acid sequence selected from the group consisting of SEQ ID NO:2, SEQ ID NO:4, SEQ ID NO:6, SEQ ID NO:8, SEQ ID NO:10, SEQ ID NO:12, SEQ ID NO:14, SEQ ID NO:16, SEQ ID NO:18, SEQ ID NO:20, SEQ ID NO:22, SEQ ID NO:24, SEQ ID NO:26, SEQ ID NO:28, SEQ ID NO:30, SEQ ID NO:32, SEQ ID NO:34, SEQ ID NO:36, SEQ ID NO:276, SEQ ID NO:278, SEQ ID NO:280, SEQ ID NO:282, SEQ ID NO:322, SEQ ID NO:324, and SEQ ID NO:326. In some embodiments, the bicistronic iCAR/aCAR construct or monocistronic aCAR and iCAR constructs for co-transduction comprises an amino acid sequence selected from the group consisting of SEQ ID NO:276, SEQ ID NO:278, SEQ ID NO:280, SEQ ID NO:282, SEQ ID NO:322, SEQ ID NO:324, and SEQ ID NO:326. In some embodiments, the treatment method employs administration of a safe effector cell comprising the bicistronic iCAR/aCAR construct or monocistronic aCAR and iCAR constructs for co-transduction. In some embodiments, the treatment method employs administration of a safe effector cell expressing the bicistronic iCAR/aCAR construct or monocistronic aCAR and iCAR constructs for co-transduction.

[0504] The compositions may be formulated for parenteral administration by injection, e.g., by bolus injection or continuous infusion. Formulations for injection may be presented in unit dosage form, e.g., in ampoules or in multidose containers, with an added pharmaceutically acceptable carrier and/or preservative. The compositions may take such forms as suspensions, solutions or emulsions in oily or aqueous vehicles, and may contain formulatory agents such as suspending, stabilizing and/or dispersing agents.

[0505] For purposes of clarity, and in no way limiting the scope of the teachings, unless otherwise indicated, all numbers expressing quantities, percentages or proportions, and other numerical values recited herein, should be interpreted as being preceded in all instances by the term “about.” Accordingly, the numerical parameters recited in the present specification are approximations that may vary depending on the desired outcome. For example, each numerical parameter may be construed in light of the number of reported significant digits and by applying ordinary rounding techniques.

### EXAMPLES

### Example 1. Development and Testing of Bicistronic Inhibitory Chimeric Antigen Receptor (iCAR)/Activating Chimeric Antigen Receptor (aCAR) Constructs

### INTRODUCTION

[0506] This example provides the results related to development and testing of bicistronic inhibitory chimeric antigen receptor (iCAR)/activating chimeric antigen receptor (aCAR) constructs in order to develop cancer therapeutics for use in safely target tumors that have lost genomic segments encoding cell-membrane proteins with polymorphic protein coding changes). Data provide in the example and figures include T-REP identification of new iCAR leads, new human HLA-A2 scFv constructs, and bicistronic LV transduction—FaDu/MCF7-Luc immune killing assay—including development of novel iCAR leads.

[0507] Bicistronic iCAR/aCAR constructs have been developed and preliminary testing performed in order to prepare and examine these constructs for use as cancer therapeutics. See, FIGS. 1-59 as well as Tables 1-22 for illustrative design and evaluation of examples of iCAR and aCAR constructs as described herein, as well as sequences thereof.

### Materials and Methods

[0508] mRNA Transcription In Vitro

[0509] Appropriate plasmids were linearized using SpeI or BamHI restriction enzymes. Linear plasmid was used to transcribe in-vitro mRNA using T7mScript Standard mRNA Production System (CELLSCRIPT, Madison, U.S.A.). The concentration and quality of the mRNA were assessed by spectrophotometry. Preparation was according to manufacturer's protocol.

[0510] PBMC Purification

[0511] Leukocyte enriched samples were acquired from The Sheba Medical Center blood bank, diluted with equal volumes of PBS and loaded on Ficoll-Paque PLUS (GE Healthcare) for density-based cell separation. Preparation was according to manufacturer's protocol. Mononuclear cells were collected from the plasma/Ficoll interface, washed several times and resuspended in Cryostor CS10 (Merck).

[0512] PBMC Culture and Transduction

[0513] PBMCs were thawed and seeded at a density of 1×10⁶ cells/ml in LymphoOne medium (Takara-Bio, Kusatsu, Japan) supplemented with 100 U/ml IL2 (Miltenyi Biotech, Bergisch Gladbach, Germany). The next day concentrated lentiviruses were added at an MOI of 5, 10, or 20 (according to prior calibrations). After 3 days cells were transferred to 24-well G-Rex plates (Wilson Wolf, Saint Paul, MN) containing LymphoOne medium supplemented with 1% human serum (Access Biologicals, Vista, CA) and 100 U/ml IL2. On day 7 post-thaw 100 U/ml IL2 was added, and on day 8 the medium was replaced. Functional assays were typically performed.

[0514] mRNA Electroporation

[0515] On day 8 or 10 of PBMC's culture, 2×10⁶ cells were washed twice with OptiMEM medium (GibcoBRL, Grand Island, NY). The cells were resuspended in 100 ul OptiMEM containing 1-10 ug mRNA and electroporated in 2 mm cuvette, using NepaGene21 electroporator (Nepa Gene Co., Ltd., Japan) at 200V, 2.5 ms, one pulse or using ECM830 electroporator (BTX.Ltd., US) at 300V, 2 ms, one pulse. The cells were resuspended in 5 ml growth medium and transferred into 6 well plates for further incubation.

### IncuCyte Cytotoxicity Assay

[0516] Target cells expressing nuclear-GFP (nGFP) were seeded in black-walled 384-well plates with microclear bottom (Greiner Bio-One, Kremsmunster, Austria), 1.5×10⁴ cells per well, in LymphoOne medium supplemented with 1% human serum. The next day, transduced or electroporated PBMCs were added to the wells at the desired E:T ratio. Annexin-V Red (Essen BioScience, Ann Arbor, MI) to detect apoptosis was added immediately before adding PBMCs). Plates were imaged for 3 days using the IncuCyte S3 (Essen BioScience) instrument at 37 C, 5% CO₂. Percent killing was calculated as nGFP+ Annexin-V-Red+ cell count divided by total nGFP+ cell count.

### ELISA

[0517] Target cells expressing nuclear-GFP (nGFP) were seeded in 96 well plates (Thermo, NU-167008), 5×10³ cells per well, in LymphoOne medium supplemented with 1% human serum. The next day, transduced or electroporated PBMCs were added to the wells at 5:1 E:T ratio. Cells are co-incubated for 15-18 hrs at 37 C, 5% CO₂. Following co-incubation, supernatant is harvested and transferred to non-binding 96-well plates (Greiner, #655901) at −200c. Supernatants are diluted 3 and 100-fold, ELISA performed as to manufactures instruction (Human IFN-gamma Quantikine, R&D, #SIF50) and quantified using Tecan plate reader.

### Quantification of Antigen Expression by Flow Cytometry

[0518] The MESF/“Antibody Binding Capacity” (ABC) ratio of a particular antibody can be used to quantify the number of antigen sites per cell. To establish the MESF/ABC ratio of each antibody Lot, MFIs of stained SCQ beads were correlated to the MFIs of MESF standards. The slope of the curve constitutes the ratio of fluorochrome label in MESF units per antibody. The MESF/ABC of every antibody Lot was measured using mouse/human/rat Simple Cellular Quantum (SCQ) Beads and MESF standards purchased from Bangs laboratories. Each of the 4 populations of SCQ beads has a known Antibody Binding Capacity (ABC), typically in the range of several thousands to 500-800K, so by staining these beads with an antibody at near saturation, one can correlate the fluorescence measurement (MFI) on a flow cytometer to the amount of bound antibody (ABC). MESF standard beads are composed of 4-5 different bead populations labeled with a known amount of fluorochrome molecules. By running MESF beads on a flow cytometer, one can correlate an MFI measurement to MESF units and compare between data that was collected on multiple different occasions, PMT voltages and instruments. When using HLA-A2/NYESO1-PE tetramers to stain tag-less iCAR constructs, the MESF/ABC ratio was established by staining control Jurkat cell lines that express a tagged aCAR and iCAR at high and low levels, with both quantifiable Anti-Myc Tag antibody and HLA-A2/NYESO1-PE tetramers. For each staining 100-200K positive cells were washed twice with 100 ul of cold FACS buffer (2% FCS in PBS×1) by centrifugation, 300 g for 5 min at 4° C. For Flag tagged aCAR and Myc tagged iCAR quantification, the cells were stained with 50 ul of APC (130-119-584, Miltenyi) and FITC (130-116-485, Miltenyi) labeled antibodies diluted 1/25 with FACS buffer. For un-tagged trastuzumab aCAR and Anti-HLA-A2 iCAR quantification, primary human Anti-Trastuzumab scFv69 (Ab00618-10.0, Absolute Antibody), HLA-A2/NYESO1-PE tetramers (TB-M105-1, MBL) and secondary Anti-human Fc APC (BLG-409306, biolegend) were diluted in FACS buffer, 1/25, 1/5 and 1/10 respectively. For target cell line antigen quantification, Anti-EGFR PE (FAB9577P-100, R&D), Anti-HER2 APC (130-106-696, Miltenyi) and Anti-HLA-A2 APC (17-9876-42, ebioscience) were diluted with FACS buffer, 1/2.5, 1/10 and 1/5 respectively. The cells were incubated at 4° C. in the dark for 45-60 min and washed thrice with 100 ul cold FACS buffer as described previously. The cells were resuspended with 150 ul of FACS buffer or PBS×1 containing 0.5-1 ug/ml DAPI (MBD0015-1, Merck-Sigma). The cells were analyzed by flow cytometry (BD FACS Celesta or MACSQuant Analyzer 10) collecting 10K-50K double positive events from each sample. Next, without changing the PMT voltages on the instrument, 5-10K events of each population of relevant MESF standard beads (FITC 555P-5ML, APC 823-5ML, PE 827-5ML, Bangs), were collected. FlowJo software was used to gate and calculate MFIs (Geometric Mean Fluorescence) and MESF beads QuickCal files, provided by the manufacturer, were used to convert the MFIs in to MESF units. Next, the values were converted to ABC units Using the MESF/ABC curves of the specific antibody lots used.

### Discussion

[0519] FaDu/MCF7-Luc Immune Killing Assay

[0520] Identification of novel iCAR using a nucGFP labeled target cells endpoint and bicistronic LV transduction.

[0521] The assay was useful regarding increasing the potency of iCAR inhibition (scFv avidity & activity) is necessary to decrease the iCAR/aCAR stoichiometry for efficient aCAR protection. Continued development and analysis related to dual differential expression in a lentiviral bicistronic format is ongoing and in progress.

[0522] Focused on HER2 (anti-Trastuzumab scFv) as an aCAR. Identified fully human or humanized scFv's to target HLA-A2. Identified novel iDomains (LIR1, KIR2DL1, KIR2DL2, and/or BTLA).

Lentiviral dualCAR Expression

[0523] Low transduction efficiency and variable differential expression.

[0524] iCAR constructs are identical, except for variations in the inhibitory domain.

[0525] aCAR constructs are also identical, except for variations in the scFv: Cetuximab or Panitumumab for EGFR and Trastuzumab or Pertuzumab for Her2.

[0526] All constructs are in iCAR/aCAR configuration with T2A cleavable linker.

[0527] IncuCyte Immune Cell Killing Assay: a cell imagining platform to monitor target killing and proliferation, and T-cell activation kinetics.

[0528] Quantum Bead Assay: a methodology to incorporate absolute aCAR & iCAR level, stoichiometry, and expression kinetics into screening and analysis.

[0529] IMPT001 GO: in vitro validation HLA-A2 scFv/PD-1 iCAR pairing with EGFR & HER2 scFv aCAR using mRNA co-electroporation of constructs into effector cells, using the Incucyte platform and FACS T-cell profiling IMPT001 go.

[0530] Lentiviral Technology: Design and evaluate the expression of mono- and dual lentiviral aCAR & iCAR to support IMPT001 and identify novel iCAR (64 constructs).

[0531] New Potent HLA-A2 scFv: Characterize a fully human HLA-A2 scFv alternative to murine BB7.2 as a lentiviral iCAR transduced into donor PBMC that appears to bind HLA-A tetramers more avidly.

[0532] FaDU/U87-Luc Immune Killing Assay: identification of novel iCAR using a Luciferase viability endpoint. LIR1 & KIR2DL1 iCARs identified.

### Validation of an IncuCyte Immune Cell Killing Assay

[0533] Dependence of target cell killing & proliferation on E/T ratio.

[0534] Implemented an immune cell killing assay that simultaneously images the kinetics of target cell killing and proliferation, and T-cell activation.

[0535] The technology is applicable to diverse adherent cancer cell lines partially circumventing the time and cost associated with engineering isogenic cell lines.

[0536] The kinetic and endpoints are a quantitative metrics that will allow dual CAR ranking, i.e., directly proportional to E/T ratio and aCAR and iCAR level.

[0537] The sensitivity (E/T EC50) of target cancer cell lines to EGFR and HER2 aCAR killing varies >5-fold and does not correlate with EGFR expression level.

### Cell-Surface Expression

[0538] Absolute iCAR/aCAR level and stoichiometry—Effector cells. Absolute iCAR/aCAR antigen level and stoichiometry—Target cells. See, for example, FIG. 14.

[0539] A highly reproducible FACS based method has been implemented to quantify absolute CAR and target antigen levels)

[0540] The level of aCAR and iCAR expression obtained with mRNA co-electroporation are linearly dependent on mRNA amount.

[0541] Stoichiometric expression by co-electroporation is heavily iCAR biased (e.g., iCAR/aCAR slope=6.0 on the Jurkat experiment (See, for example, FIGS. 12-13).

### An EGFR x HLA-A2 Dual CAR

[0542] Validation with mRNA co-electroporation studies.

[0543] Pairing of Cetuximab aCAR with a BB7.2 PD-1 iCAR was assessed by mRNA co-electroporation in HLA-A2 NEG and HLA-A2 POS adherent cancer cell-lines.

[0544] Killing of FaDu A2 NEG cells by dual CAR T-cells was obtained at low E/T ratios without apparent loss of aCAR activity, U87 A2 POS (EGFR aCAR sensitive) cancer cells were fully protected.

[0545] All HLA-A2 POS cancer cell lines tested inhibited T-cell activation (CD107a, IFNg) at low E/T regardless of HLA-A2 level (˜10⁵ to ˜10⁶ per cell) and target cell killing efficiency.

[0546] CAR quantification has not yet been performed, however HLA-A2 dependent protection is associated with excess iCAR exposure (>10-fold Cmax). See, for example, FIG. 12A.

[0547] Pairing of Trastuzumab scFv aCAR with a BB7.2 scFv PD-1 iCAR was assessed by mRNA co-electroporation in HLA-A2 NEG and HLA-A2 POS adherent cancer cell-lines.

[0548] Killing of FaDu A2 NEG cells by dual CAR T-cells was obtained at E/T=10 without apparent loss of aCAR activity.

[0549] Protection of MDA-MB-231 A2 POS cancer cells appeared to depend on a 300-fold excess of iCAR over aCAR expression (Cmax).

[0550] In contrast, lower iCAR levels were sufficient to inhibit T-cell activation (CD107a, IFNg, TNFα) regardless of target cell killing efficiency.

### Dual CAR Lentiviral Transduction

[0551] Absolute and stoichiometric expression in PBMCs.

[0552] iCAR constructs are identical, except for variations in the inhibitory domain.

[0553] aCAR constructs are also identical, except for variations in the scFv: Cetuximab or Panitumumab for EGFR and Trastuzumab or Pertuzumab for Her2.

[0554] All constructs are in iCAR/aCAR configuration with T2A cleavable linker.

[0555] The PBMC transduction efficiency (% gated double positive) of lentiviral bicistronic CARs was variable and most often too low (<20%) for IncuCyte co-culture assays.

[0556] iCAR expression (proximal gene) could exceed aCAR expression (distal gene) by 5-10 fold but exceptions and failures were not uncommon.

Identification of HUMAN Alternatives to BB7.2 HLA-A2 scFv

[0557] Mono-cistronic expression in PBMCs and HLA-A tetramer binding.

[0558] Binding to HLA-A2 tetramers was observed for BB7.2 (++), 3PF12 (+++), SN66E3 (+++), MBW1. Sequence Modifies (++). Binding to HLA-A2 tetramers was no observed for Ha5C2.A2 and murine BBM.1.

[0559] cMYC tag reports surface expression of iCARs.

[0560] HLA-A2 tetramer reports on HLA-A2 scFv binding.

[0561] Two fully human HLA-A2 scFv were identified as potential alternatives to BB7.2 (murine) that appear to bind HLA-A2 tetramer with higher avidity: 3PF12 and SN66E3.

### FaDu/U87-Luc Immune Killing Assay

[0562] Identification of novel iCAR using a Luciferase viability endpoint.

[0563] FaDu/U87-Luc Assay was developed and internal controls were validated. EGFR aCARs show robust specific killing of FaDu and U87 cells. HLA-A2 aCAR shows specific killing in U87 HLA-A2 POS cells.

[0564] Achieves high E/T ratios without assay interference (E/T=64).

[0565] HLA-A2 dependent protection observed KIR2DL1 is consistent with T-REP (KIR2DL2) and Jurkat NFAT-Luc FA experiments (KIR2DL1+KIR2DL2).

### FaDu/MCF7-Luc Immune Killing Assay

[0566] Identification of novel iCAR using a Luciferase viability endpoint.

[0567] FaDu/MCF7-Luc Assay was developed and internal controls were validated. HER2 aCARs show robust specific killing of FaDu and MCF7 cells. Achieves high E/T ratios without assay interference (E/T=20).

[0568] HLA-A2 dependent protection observed with KIR2DL1 is consistent with T-REP (KIR2DL2) and Jurkat NFAT-Luc FA experiments (KIR2DL1+KIR2DL2).

[0569] HLA-A2 dependent protection observed with LIR1 is consistent with Jurkat NFAT-Luc FA experiments.

### SUMMARY

[0570] The data provide herein supports in vitro validation of a humanized BB7.2 iCAR scFv (see, for example, FIG. 59). This data confirmed that efficacy was observed for all constructs with a Hz BB7.2 version. This data also demonstrated that protection was observed for all constructs with a Hz BB7.2 version. VR428 and VR421 were identified as exemplary constructs.

[0571] Also provided by the data was in vivo validation of HzBB7.2 iCAR scFv (see, for example, FIG. 54 and FIG. 55). Both efficacy and protection were demonstrated in an in vivo study for low and high dose with VR428 administration. VR428 was identified as an exemplary construct.

[0572] Also provided by the data was in vitro validation of a fully human SN66E3.3 iCAR scFv (see, for example, FIG. 49). This data confirmed that efficacy was observed for all constructs with a fully human SN66E3 version. This data also demonstrated that protection was observed for all constructs with a fully human SN66E3 versions. VR447 and VR449 were identified as exemplary constructs.

[0573] All headings and section designations are used for clarity and reference purposes only and are not to be considered limiting in any way. For example, those of skill in the art will appreciate the usefulness of combining various aspects from different headings and sections as appropriate according to the spirit and scope of the invention described herein.

[0574] All references cited herein are hereby incorporated by reference herein in their entireties and for all purposes to the same extent as if each individual publication or patent or patent application was specifically and individually indicated to be incorporated by reference in its entirety for all purposes.

[0575] Many modifications and variations of this application can be made without departing from its spirit and scope, as will be apparent to those skilled in the art. The specific embodiments and examples described herein are offered by way of example only, and the application is to be limited only by the terms of the appended claims, along with the full scope of equivalents to which the claims are entitled.

The application's sequence listing, which the Patent Office published only in electronic form, follows.

SEQUENCE LISTING (334 sequences)

SEQ ID NO: 1 - DNA, 2835 bp, Artificial Sequence
  Synthetic
atggcactgccagtgaccgccctgctgctgcctctggccctgctgctgcacgcagccagaccccaggtgcagctgcagcagtctggacctgagctggtgaagccaggagcctccgtgaagatgtcttgcaaggccagcggctacaccttcacatcttatcacatccagtgggtgaagcagcggcccggacagggcctggagtggatcggatggatctacccaggcgacggctccacacagtataacgagaagttcaagggcaagaccacactgaccgccgataagagcagcagcaccgcctacatgctgctgagcagcctgaccagcgaggacagcgccatctacttttgcgccagggagggcacatactatgctatggactattggggccagggcaccagcgtgacagtgtctagcggaggaggaggctccggaggaggaggctctggcggcggcggcagcgacgtgctgatgacccagacaccactgagcctgcccgtgagcctgggcgatcaggtgagcatctcctgtagatcctctcagagcatcgtgcactccaacggcaatacctacctggagtggtatctgcagaagccaggccagtcccccaagctgctgatctataaggtgtctaatcggttcagcggcgtgcctgacagattttctggcagcggctccggcaccgacttcaccctgaagatcagccgggtggaggcagaggatctgggcgtgtactattgtttccagggctcccacgtgccacgcacctttggcggcggtaccaagctggagatcaagattgaagttatgtatcctcctccttacctagacaatgagaagagcaatggaaccattatccatgtgaaagggaaacacctttgtccaagtcccctatttcccgggccttcgaagcccttttgggtgctggtggtggttggtggagtcctggcttgctatagcttgctagtaacagtagcgtttattattttctgggtgtgcagcagggccgcccgcggcaccatcggcgccaggcgcacaggccagcctctgaaggaggacccttccgccgtgccagtgttctctgtggactacggcgagctggattttcagtggcgggagaaaaccccagagccacctgtgccctgcgtgcctgagcagaccgagtatgccacaatcgtgtttccatccggaatgggcacaagctcccctgcaaggagaggcagcgccgacggaccacggtccgcccagccactgcggcccgaggatggccactgttcttggcccctgcggagaaagcgtggatccggggaaggccgaggctcccttctaacatgtggagatgtcgaggaaaaccctggccctatggcgctgccagtcactgcattgttattgcctctggccctgcttctccatgcggcgcgcccagaagtgcagctggtcgagagcggaggcggactggttcaacccggaggcagcttgagactgtcctgcgcggccagcggcttcaacatcaaggatacctatatccactgggtgaggcaggctccaggaaagggcctggagtgggtggcaaggatttaccctactaatggatatacacgctacgctgattccgtgaagggacgctttacaatctcagcagatacatccaaaaacacggcctatttacagatgaatagtttgcgggccgaagacacggctgtatactattgttctcggtgggggggcgatggattttatgcgatggattactggggccagggcaccctggtaaccgtgtcaagcggctcaacatccgggtccggtaagccgggctccggcgaggggtctacaaagggagatatacagatgacacagtcccccagttccctgtccgcctcagtgggagaccgagtgacgattacctgtcgtgccagccaggacgtcaataccgccgtcgcttggtatcagcaaaaaccaggcaaggccccgaaactattgatctacagtgcctcttttctgtactccggggtgccgagcagatttagtggctccaggagcggaaccgatttcaccctaaccatttccagtttgcagccagaggatttcgcgacctattactgccagcaacactacaccacaccgccaactttcggacaaggaaccaaggttgaaatcaaaactacgaccccagcacctagacctcccaccccagctccaactatagcttcccagccattgtctctccggccagaggcgtgtcgaccagccgctggaggggccgttcatacaagaggactcgatttcgcttgcgatatctacatatgggcccctcttgccgggacatgcggtgtcctgcttctaagcttggttattaccctctattgcaaacgcggccgcaagaaactgctctacatctttaaacagccgttcatgaggcctgtgcagacaacgcaggaagaggatggctgtagttgtcggtttccggaagaggaagaggggggctgcgagttgcgtgtcaaattttctcggtctgccgacgcccccgcgtaccagcaagggcagaaccagctttataatgagctgaatcttggacgacgggaggaatatgacgtgcttgacaagaggcgaggtagggaccctgagatggggggaaaacctcggaggaaaaacccacaggaaggcctgtataacgaactgcagaaggacaagatggctgaagcctactctgagattggaatgaaaggggaacgcagacgcggcaagggccatgatggcctctaccaaggtctaagcactgccaccaaggacacctatgacgcactccacatgcaagctctacctccccgttgataa

SEQ ID NO: 2 - protein, 943 aa, Artificial Sequence
  Synthetic
MALPVTALLLPLALLLHAARPQVQLQQSGPELVKPGASVKMSCKASGYTFTSYHIQWVKQRPGQGLEWIGWIYPGDGSTQYNEKFKGKTTLTADKSSSTAYMLLSSLTSEDSAIYFCAREGTYYAMDYWGQGTSVTVSSGGGGSGGGGSGGGGSDVLMTQTPLSLPVSLGDQVSISCRSSQSIVHSNGNTYLEWYLQKPGQSPKLLIYKVSNRFSGVPDRFSGSGSGTDFTLKISRVEAEDLGVYYCFQGSHVPRTFGGGTKLEIKIEVMYPPPYLDNEKSNGTIIHVKGKHLCPSPLFPGPSKPFWVLVVVGGVLACYSLLVTVAFIIFWVCSRAARGTIGARRTGQPLKEDPSAVPVFSVDYGELDFQWREKTPEPPVPCVPEQTEYATIVFPSGMGTSSPARRGSADGPRSAQPLRPEDGHCSWPLRRKRGSGEGRGSLLTCGDVEENPGPMALPVTALLLPLALLLHAARPEVQLVESGGGLVQPGGSLRLSCAASGFNIKDTYIHWVRQAPGKGLEWVARIYPTNGYTRYADSVKGRFTISADTSKNTAYLQMNSLRAEDTAVYYCSRWGGDGFYAMDYWGQGTLVTVSSGSTSGSGKPGSGEGSTKGDIQMTQSPSSLSASVGDRVTITCRASQDVNTAVAWYQQKPGKAPKLLIYSASFLYSGVPSRFSGSRSGTDFTLTISSLQPEDFATYYCQQHYTTPPTFGQGTKVEIKTTTPAPRPPTPAPTIASQPLSLRPEACRPAAGGAVHTRGLDFACDIYIWAPLAGTCGVLLLSLVITLYCKRGRKKLLYIFKQPFMRPVQTTQEEDGCSCRFPEEEEGGCELRVKFSRSADAPAYQQGQNQLYNELNLGRREEYDVLDKRRGRDPEMGGKPRRKNPQEGLYNELQKDKMAEAYSEIGMKGERRRGKGHDGLYQGLSTATKDTYDALHMQALPPR

SEQ ID NO: 3 - DNA, 2829 bp, Artificial Sequence
  Synthetic
atggcactgccagtgaccgccctgctgctgcctctggccctgctgctgcacgcagccagaccccaggtgcagctgcagcagtctggacctgagctggtgaagccaggagcctccgtgaagatgtcttgcaaggccagcggctacaccttcacatcttatcacatccagtgggtgaagcagcggcccggacagggcctggagtggatcggatggatctacccaggcgacggctccacacagtataacgagaagttcaagggcaagaccacactgaccgccgataagagcagcagcaccgcctacatgctgctgagcagcctgaccagcgaggacagcgccatctacttttgcgccagggagggcacatactatgctatggactattggggccagggcaccagcgtgacagtgtctagcggaggaggaggctccggaggaggaggctctggcggcggcggcagcgacgtgctgatgacccagacaccactgagcctgcccgtgagcctgggcgatcaggtgagcatctcctgtagatcctctcagagcatcgtgcactccaacggcaatacctacctggagtggtatctgcagaagccaggccagtcccccaagctgctgatctataaggtgtctaatcggttcagcggcgtgcctgacagattttctggcagcggctccggcaccgacttcaccctgaagatcagccgggtggaggcagaggatctgggcgtgtactattgtttccagggctcccacgtgccacgcacctttggcggcggtaccaagctggagatcaagattgaagttatgtatcctcctccttacctagacaatgagaagagcaatggaaccattatccatgtgaaagggaaacacctttgtccaagtcccctatttcccgggccttcgaagcccttttgggtgctggtggtggttggtggagtcctggcttgctatagcttgctagtaacagtagcgtttattattttctgggtgtgcagcagggccgcccgcggcaccatcggcgccaggcgcacaggccagcctctgaaggaggacccttccgccgtgccagtgttctctgtggactacggcgagctggattttcagtggcgggagaaaaccccagagccacctgtgccctgcgtgcctgagcagaccgagtatgccacaatcgtgtttccatccggaatgggcacaagctcccctgcaaggagaggcagcgccgacggaccacggtccgcccagccactgcggcccgaggatggccactgttcttggcccctgcggagaaagcgtggatccggggaaggccgaggctcccttctaacatgtggagatgtcgaggaaaaccctggccctatggcgctgccagtcactgcattgttattgcctctggccctgcttctccatgcggcgcgcccacaagtgcagctgaaacagagcggaccaggactggttcaacccagccagagcttgagcatcacgtgcacggttagcggcttcagtctgaccaattatggtgtgcactgggtgaggcagtctccaggaaagggcctggagtggcttggagtcatttggagcggtgggaatacagattacaatacaccttttacgtcacgtctctccattaacaaggacaactccaaatcccaagtatttttcaaaatgaatagcctgcagagtaatgataccgccatctattactgtgcacgagctttgacatattacgactatgaatttgcctattggggtcaaggcacgctggtgaccgtatcaggctcaacatccgggtccggtaagccgggctccggcgaggggtctacaaagggagacatccttctgacacagagccccgtgatcctgtccgtgtcccccggcgagagagtatcattttcctgtagggcttctcagagcatcggaacaaatatccactggtatcagcaacggactaacggatcacctcgcctgctcataaagtacgccagtgaatctattagtggcataccgagccgcttcagcgggagtggctccggcacagactttactctgagtataaattccgtggaatctgaggacatcgcggactattactgccagcaaaacaataactggcccaccacgttcggcgcgggaactaaactagaactaaagactacgaccccagcacctagacctcccaccccagctccaactatagcttcccagccattgtctctccggccagaggcgtgtcgaccagccgctggaggggccgttcatacaagaggactcgatttcgcttgcgatatctacatatgggcccctcttgccgggacatgcggtgtcctgcttctaagcttggttattaccctctattgcaaacgcggccgcaagaaactgctctacatctttaaacagccgttcatgaggcctgtgcagacaacgcaggaagaggatggctgtagttgtcggtttccggaagaggaagaggggggctgcgagttgcgtgtcaaattttctcggtctgccgacgcccccgcgtaccagcaagggcagaaccagctttataatgagctgaatcttggacgacgggaggaatatgacgtgcttgacaagaggcgaggtagggaccctgagatggggggaaaacctcggaggaaaaacccacaggaaggcctgtataacgaactgcagaaggacaagatggctgaagcctactctgagattggaatgaaaggggaacgcagacgcggcaagggccatgatggcctctaccaaggtctaagcactgccaccaaggacacctatgacgcactccacatgcaagctctacctccccgttgataa

SEQ ID NO: 4 - protein, 941 aa, Artificial Sequence
  Synthetic
MALPVTALLLPLALLLHAARPQVQLQQSGPELVKPGASVKMSCKASGYTFTSYHIQWVKQRPGQGLEWIGWIYPGDGSTQYNEKFKGKTTLTADKSSSTAYMLLSSLTSEDSAIYFCAREGTYYAMDYWGQGTSVTVSSGGGGSGGGGSGGGGSDVLMTQTPLSLPVSLGDQVSISCRSSQSIVHSNGNTYLEWYLQKPGQSPKLLIYKVSNRFSGVPDRFSGSGSGTDFTLKISRVEAEDLGVYYCFQGSHVPRTFGGGTKLEIKIEVMYPPPYLDNEKSNGTIIHVKGKHLCPSPLFPGPSKPFWVLVVVGGVLACYSLLVTVAFIIFWVCSRAARGTIGARRTGQPLKEDPSAVPVFSVDYGELDFQWREKTPEPPVPCVPEQTEYATIVFPSGMGTSSPARRGSADGPRSAQPLRPEDGHCSWPLRRKRGSGEGRGSLLTCGDVEENPGPMALPVTALLLPLALLLHAARPQVQLKQSGPGLVQPSQSLSITCTVSGFSLTNYGVHWVRQSPGKGLEWLGVIWSGGNTDYNTPFTSRLSINKDNSKSQVFFKMNSLQSNDTAIYYCARALTYYDYEFAYWGQGTLVTVSGSTSGSGKPGSGEGSTKGDILLTQSPVILSVSPGERVSFSCRASQSIGTNIHWYQQRTNGSPRLLIKYASESISGIPSRFSGSGSGTDFTLSINSVESEDIADYYCQQNNNWPTTFGAGTKLELKTTTPAPRPPTPAPTIASQPLSLRPEACRPAAGGAVHTRGLDFACDIYIWAPLAGTCGVLLLSLVITLYCKRGRKKLLYIFKQPFMRPVQTTQEEDGCSCRFPEEEEGGCELRVKFSRSADAPAYQQGQNQLYNELNLGRREEYDVLDKRRGRDPEMGGKPRRKNPQEGLYNELQKDKMAEAYSEIGMKGERRRGKGHDGLYQGLSTATKDTYDALHMQALPPR

SEQ ID NO: 5 - DNA, 2835 bp, Artificial Sequence
  Synthetic
atggcactgccagtgaccgccctgctgctgcctctggccctgctgctgcacgcagccagaccccaagtgcaactagtccaatcaggtggaggcgtcgtgcaacctggagggtccctccgcgttagctgcgccgcatcaggcgttaccttgtcagactacggcatgcattgggttaggcaagcccccggcaaggggctcgaatggatggctttcattcggaatgacgggagcgataaatattacgcggattcagttaaagggcggttcaccatcagccgcgacaatagcaaaaagacggtctccttacagatgtccagcttgcgggccgaagacacggctgtatactattgtgctaaaaatggcgagagcggccccctggattactggtactttgacctgtggggcagaggcaccctggtcacggtgtcctctggaggaggaggctccggaggaggaggctctggcggcggcggcagcgacattgtaatgacccagtcaccctccttccttagtgcctcagtcggagaccgcgtgactatcacttgtcgtgcctcacacggaattaataactacctcgcttggtatcagcaaaaaccaggcaaggccccgaaactattgatctacgccgcatctactctgcagagcggagtaccgagcagatttagtggttccggcagcggaaccgagttcaccctaaccatttccagtttgcagccagaggatttcgcgacctattactgccagcaatacgattcatacccgccaactttcggaagaggtaccaaggttgaaatcaagattgaagttatgtatcctcctccttacctagacaatgagaagagcaatggaaccattatccatgtgaaagggaaacacctttgtccaagtcccctatttcccgggccttcgaagcccttttgggtgctggtggtggttggtggagtcctggcttgctatagcttgctagtaacagtagcgtttattattttctgggtgtgcagcagggccgcccgcggcaccatcggcgccaggcgcacaggccagcctctgaaggaggacccttccgccgtgccagtgttctctgtggactacggcgagctggattttcagtggcgggagaaaaccccagagccacctgtgccctgcgtgcctgagcagaccgagtatgccacaatcgtgtttccatccggaatgggcacaagctcccctgcaaggagaggcagcgccgacggaccacggtccgcccagccactgcggcccgaggatggccactgttcttggcccctgcggagaaagcgtggatccggggaaggccgaggctcccttctaacatgtggagatgtcgaggaaaaccctggccctatggcgctgccagtcactgcattgttattgcctctggccctgcttctccatgcggcgcgcccagaagtgcagctggtcgagagcggaggcggactggttcaacccggaggcagcttgagactgtcctgcgcggccagcggcttcaacatcaaggatacctatatccactgggtgaggcaggctccaggaaagggcctggagtgggtggcaaggatttaccctactaatggatatacacgctacgctgattccgtgaagggacgctttacaatctcagcagatacatccaaaaacacggcctatttacagatgaatagtttgcgggccgaagacacggctgtatactattgttctcggtgggggggcgatggattttatgcgatggattactggggccagggcaccctggtaaccgtgtcaagcggctcaacatccgggtccggtaagccgggctccggcgaggggtctacaaagggagatatacagatgacacagtcccccagttccctgtccgcctcagtgggagaccgagtgacgattacctgtcgtgccagccaggacgtcaataccgccgtcgcttggtatcagcaaaaaccaggcaaggccccgaaactattgatctacagtgcctcttttctgtactccggggtgccgagcagatttagtggctccaggagcggaaccgatttcaccctaaccatttccagtttgcagccagaggatttcgcgacctattactgccagcaacactacaccacaccgccaactttcggacaaggaaccaaggttgaaatcaaaactacgaccccagcacctagacctcccaccccagctccaactatagcttcccagccattgtctctccggccagaggcgtgtcgaccagccgctggaggggccgttcatacaagaggactcgatttcgcttgcgatatctacatatgggcccctcttgccgggacatgcggtgtcctgcttctaagcttggttattaccctctattgcaaacgcggccgcaagaaactgctctacatctttaaacagccgttcatgaggcctgtgcagacaacgcaggaagaggatggctgtagttgtcggtttccggaagaggaagaggggggctgcgagttgcgtgtcaaattttctcggtctgccgacgcccccgcgtaccagcaagggcagaaccagctttataatgagctgaatcttggacgacgggaggaatatgacgtgcttgacaagaggcgaggtagggaccctgagatggggggaaaacctcggaggaaaaacccacaggaaggcctgtataacgaactgcagaaggacaagatggctgaagcctactctgagattggaatgaaaggggaacgcagacgcggcaagggccatgatggcctctaccaaggtctaagcactgccaccaaggacacctatgacgcactccacatgcaagctctacctccccgttgataa

SEQ ID NO: 6 - protein, 943 aa, Artificial Sequence
  Synthetic
MALPVTALLLPLALLLHAARPQVQLVQSGGGVVQPGGSLRVSCAASGVTLSDYGMHWVRQAPGKGLEWMAFIRNDGSDKYYADSVKGRFTISRDNSKKTVSLQMSSLRAEDTAVYYCAKNGESGPLDYWYFDLWGRGTLVTVSSGGGGSGGGGSGGGGSDIVMTQSPSFLSASVGDRVTITCRASHGINNYLAWYQQKPGKAPKLLIYAASTLQSGVPSRFSGSGSGTEFTLTISSLQPEDFATYYCQQYDSYPPTFGRGTKVEIKIEVMYPPPYLDNEKSNGTIIHVKGKHLCPSPLFPGPSKPFWVLVVVGGVLACYSLLVTVAFIIFWVCSRAARGTIGARRTGQPLKEDPSAVPVFSVDYGELDFQWREKTPEPPVPCVPEQTEYATIVFPSGMGTSSPARRGSADGPRSAQPLRPEDGHCSWPLRRKRGSGEGRGSLLTCGDVEENPGPMALPVTALLLPLALLLHAARPEVQLVESGGGLVQPGGSLRLSCAASGFNIKDTYIHWVRQAPGKGLEWVARIYPTNGYTRYADSVKGRFTISADTSKNTAYLQMNSLRAEDTAVYYCSRWGGDGFYAMDYWGQGTLVTVSSGSTSGSGKPGSGEGSTKGDIQMTQSPSSLSASVGDRVTITCRASQDVNTAVAWYQQKPGKAPKLLIYSASFLYSGVPSRFSGSRSGTDFTLTISSLQPEDFATYYCQQHYTTPPTFGQGTKVEIKTTTPAPRPPTPAPTIASQPLSLRPEACRPAAGGAVHTRGLDFACDIYIWAPLAGTCGVLLLSLVITLYCKRGRKKLLYIFKQPFMRPVQTTQEEDGCSCRFPEEEEGGCELRVKFSRSADAPAYQQGQNQLYNELNLGRREEYDVLDKRRGRDPEMGGKPRRKNPQEGLYNELQKDKMAEAYSEIGMKGERRRGKGHDGLYQGLSTATKDTYDALHMQALPPR

SEQ ID NO: 7 - DNA, 2829 bp, Artificial Sequence
  Synthetic
atggcactgccagtgaccgccctgctgctgcctctggccctgctgctgcacgcagccagaccccaagtgcaactagtccaatcaggtggaggcgtcgtgcaacctggagggtccctccgcgttagctgcgccgcatcaggcgttaccttgtcagactacggcatgcattgggttaggcaagcccccggcaaggggctcgaatggatggctttcattcggaatgacgggagcgataaatattacgcggattcagttaaagggcggttcaccatcagccgcgacaatagcaaaaagacggtctccttacagatgtccagcttgcgggccgaagacacggctgtatactattgtgctaaaaatggcgagagcggccccctggattactggtactttgacctgtggggcagaggcaccctggtcacggtgtcctctggaggaggaggctccggaggaggaggctctggcggcggcggcagcgacattgtaatgacccagtcaccctccttccttagtgcctcagtcggagaccgcgtgactatcacttgtcgtgcctcacacggaattaataactacctcgcttggtatcagcaaaaaccaggcaaggccccgaaactattgatctacgccgcatctactctgcagagcggagtaccgagcagatttagtggttccggcagcggaaccgagttcaccctaaccatttccagtttgcagccagaggatttcgcgacctattactgccagcaatacgattcatacccgccaactttcggaagaggtaccaaggttgaaatcaagattgaagttatgtatcctcctccttacctagacaatgagaagagcaatggaaccattatccatgtgaaagggaaacacctttgtccaagtcccctatttcccgggccttcgaagcccttttgggtgctggtggtggttggtggagtcctggcttgctatagcttgctagtaacagtagcgtttattattttctgggtgtgcagcagggccgcccgcggcaccatcggcgccaggcgcacaggccagcctctgaaggaggacccttccgccgtgccagtgttctctgtggactacggcgagctggattttcagtggcgggagaaaaccccagagccacctgtgccctgcgtgcctgagcagaccgagtatgccacaatcgtgtttccatccggaatgggcacaagctcccctgcaaggagaggcagcgccgacggaccacggtccgcccagccactgcggcccgaggatggccactgttcttggcccctgcggagaaagcgtggatccggggaaggccgaggctcccttctaacatgtggagatgtcgaggaaaaccctggccctatggcgctgccagtcactgcattgttattgcctctggccctgcttctccatgcggcgcgcccacaagtgcagctgaaacagagcggaccaggactggttcaacccagccagagcttgagcatcacgtgcacggttagcggcttcagtctgaccaattatggtgtgcactgggtgaggcagtctccaggaaagggcctggagtggcttggagtcatttggagcggtgggaatacagattacaatacaccttttacgtcacgtctctccattaacaaggacaactccaaatcccaagtatttttcaaaatgaatagcctgcagagtaatgataccgccatctattactgtgcacgagctttgacatattacgactatgaatttgcctattggggtcaaggcacgctggtgaccgtatcaggctcaacatccgggtccggtaagccgggctccggcgaggggtctacaaagggagacatccttctgacacagagccccgtgatcctgtccgtgtcccccggcgagagagtatcattttcctgtagggcttctcagagcatcggaacaaatatccactggtatcagcaacggactaacggatcacctcgcctgctcataaagtacgccagtgaatctattagtggcataccgagccgcttcagcgggagtggctccggcacagactttactctgagtataaattccgtggaatctgaggacatcgcggactattactgccagcaaaacaataactggcccaccacgttcggcgcgggaactaaactagaactaaagactacgaccccagcacctagacctcccaccccagctccaactatagcttcccagccattgtctctccggccagaggcgtgtcgaccagccgctggaggggccgttcatacaagaggactcgatttcgcttgcgatatctacatatgggcccctcttgccgggacatgcggtgtcctgcttctaagcttggttattaccctctattgcaaacgcggccgcaagaaactgctctacatctttaaacagccgttcatgaggcctgtgcagacaacgcaggaagaggatggctgtagttgtcggtttccggaagaggaagaggggggctgcgagttgcgtgtcaaattttctcggtctgccgacgcccccgcgtaccagcaagggcagaaccagctttataatgagctgaatcttggacgacgggaggaatatgacgtgcttgacaagaggcgaggtagggaccctgagatggggggaaaacctcggaggaaaaacccacaggaaggcctgtataacgaactgcagaaggacaagatggctgaagcctactctgagattggaatgaaaggggaacgcagacgcggcaagggccatgatggcctctaccaaggtctaagcactgccaccaaggacacctatgacgcactccacatgcaagctctacctccccgttgataa

SEQ ID NO: 8 - protein, 941 aa, Artificial Sequence
  Synthetic
MALPVTALLLPLALLLHAARPQVQLVQSGGGVVQPGGSLRVSCAASGVTLSDYGMHWVRQAPGKGLEWMAFIRNDGSDKYYADSVKGRFTISRDNSKKTVSLQMSSLRAEDTAVYYCAKNGESGPLDYWYFDLWGRGTLVTVSSGGGGSGGGGSGGGGSDIVMTQSPSFLSASVGDRVTITCRASHGINNYLAWYQQKPGKAPKLLIYAASTLQSGVPSRFSGSGSGTEFTLTISSLQPEDFATYYCQQYDSYPPTFGRGTKVEIKIEVMYPPPYLDNEKSNGTIIHVKGKHLCPSPLFPGPSKPFWVLVVVGGVLACYSLLVTVAFIIFWVCSRAARGTIGARRTGQPLKEDPSAVPVFSVDYGELDFQWREKTPEPPVPCVPEQTEYATIVFPSGMGTSSPARRGSADGPRSAQPLRPEDGHCSWPLRRKRGSGEGRGSLLTCGDVEENPGPMALPVTALLLPLALLLHAARPQVQLKQSGPGLVQPSQSLSITCTVSGFSLTNYGVHWVRQSPGKGLEWLGVIWSGGNTDYNTPFTSRLSINKDNSKSQVFFKMNSLQSNDTAIYYCARALTYYDYEFAYWGQGTLVTVSGSTSGSGKPGSGEGSTKGDILLTQSPVILSVSPGERVSFSCRASQSIGTNIHWYQQRTNGSPRLLIKYASESISGIPSRFSGSGSGTDFTLSINSVESEDIADYYCQQNNNWPTTFGAGTKLELKTTTPAPRPPTPAPTIASQPLSLRPEACRPAAGGAVHTRGLDFACDIYIWAPLAGTCGVLLLSLVITLYCKRGRKKLLYIFKQPFMRPVQTTQEEDGCSCRFPEEEEGGCELRVKFSRSADAPAYQQGQNQLYNELNLGRREEYDVLDKRRGRDPEMGGKPRRKNPQEGLYNELQKDKMAEAYSEIGMKGERRRGKGHDGLYQGLSTATKDTYDALHMQALPPR

SEQ ID NO: 9 - DNA, 2835 bp, Artificial Sequence
  Synthetic
atggcactgccagtgaccgccctgctgctgcctctggccctgctgctgcacgcagccagaccccaggtgcagctgcagcagtctggacctgagctggtgaagccaggagcctccgtgaagatgtcttgcaaggccagcggctacaccttcacatcttatcacatccagtgggtgaagcagcggcccggacagggcctggagtggatcggatggatctacccaggcgacggctccacacagtataacgagaagttcaagggcaagaccacactgaccgccgataagagcagcagcaccgcctacatgctgctgagcagcctgaccagcgaggacagcgccatctacttttgcgccagggagggcacatactatgctatggactattggggccagggcaccagcgtgacagtgtctagcggaggaggaggctccggaggaggaggctctggcggcggcggcagcgacgtgctgatgacccagacaccactgagcctgcccgtgagcctgggcgatcaggtgagcatctcctgtagatcctctcagagcatcgtgcactccaacggcaatacctacctggagtggtatctgcagaagccaggccagtcccccaagctgctgatctataaggtgtctaatcggttcagcggcgtgcctgacagattttctggcagcggctccggcaccgacttcaccctgaagatcagccgggtggaggcagaggatctgggcgtgtactattgtttccagggctcccacgtgccacgcacctttggcggcggtaccaagctggagatcaagactacgaccccagcacctagacctcccaccccagctccaactatagcttcccagccattgtctctccggccagaggcgtgtcgaccagccgctggaggggccgttcatacaagaggactcgatttcgcttgcgatatctacatatgggcccctcttgccgggacatgcggtgtcctgcttctaagcttggttattaccctctattgctgcagcagggccgcccgcggcaccatcggcgccaggcgcacaggccagcctctgaaggaggacccttccgccgtgccagtgttctctgtggactacggcgagctggattttcagtggcgggagaaaaccccagagccacctgtgccctgcgtgcctgagcagaccgagtatgccacaatcgtgtttccatccggaatgggcacaagctcccctgcaaggagaggcagcgccgacggaccacggtccgcccagccactgcggcccgaggatggccactgttcttggcccctgcggagaaagcgtggatccggggaaggccgaggctcccttctaacatgtggagatgtcgaggaaaaccctggccctatggcgctgccagtcactgcattgttattgcctctggccctgcttctccatgcggcgcgcccagaagtgcagctggtcgagagcggaggcggactggttcaacccggaggcagcttgagactgtcctgcgcggccagcggcttcaacatcaaggatacctatatccactgggtgaggcaggctccaggaaagggcctggagtgggtggcaaggatttaccctactaatggatatacacgctacgctgattccgtgaagggacgctttacaatctcagcagatacatccaaaaacacggcctatttacagatgaatagtttgcgggccgaagacacggctgtatactattgttctcggtgggggggcgatggattttatgcgatggattactggggccagggcaccctggtaaccgtgtcaagcggctcaacatccgggtccggtaagccgggctccggcgaggggtctacaaagggagatatacagatgacacagtcccccagttccctgtccgcctcagtgggagaccgagtgacgattacctgtcgtgccagccaggacgtcaataccgccgtcgcttggtatcagcaaaaaccaggcaaggccccgaaactattgatctacagtgcctcttttctgtactccggggtgccgagcagatttagtggctccaggagcggaaccgatttcaccctaaccatttccagtttgcagccagaggatttcgcgacctattactgccagcaacactacaccacaccgccaactttcggacaaggaaccaaggttgaaatcaaaattgaagttatgtatcctcctccttacctagacaatgagaagagcaatggaaccattatccatgtgaaagggaaacacctttgtccaagtcccctatttcccgggccttcgaagcccttttgggtgctggtggtggttggtggagtcctggcttgctatagcttgctagtaacagtagcgtttattattttctgggtgaaacgcggccgcaagaaactgctctacatctttaaacagccgttcatgaggcctgtgcagacaacgcaggaagaggatggctgtagttgtcggtttccggaagaggaagaggggggctgcgagttgcgtgtcaaattttctcggtctgccgacgcccccgcgtaccagcaagggcagaaccagctttataatgagctgaatcttggacgacgggaggaatatgacgtgcttgacaagaggcgaggtagggaccctgagatggggggaaaacctcggaggaaaaacccacaggaaggcctgtataacgaactgcagaaggacaagatggctgaagcctactctgagattggaatgaaaggggaacgcagacgcggcaagggccatgatggcctctaccaaggtctaagcactgccaccaaggacacctatgacgcactccacatgcaagctctacctccccgttgataa

SEQ ID NO: 10 - protein, 943 aa, Artificial Sequence
  Synthetic
MALPVTALLLPLALLLHAARPQVQLQQSGPELVKPGASVKMSCKASGYTFTSYHIQWVKQRPGQGLEWIGWIYPGDGSTQYNEKFKGKTTLTADKSSSTAYMLLSSLTSEDSAIYFCAREGTYYAMDYWGQGTSVTVSSGGGGSGGGGSGGGGSDVLMTQTPLSLPVSLGDQVSISCRSSQSIVHSNGNTYLEWYLQKPGQSPKLLIYKVSNRFSGVPDRFSGSGSGTDFTLKISRVEAEDLGVYYCFQGSHVPRTFGGGTKLEIKTTTPAPRPPTPAPTIASQPLSLRPEACRPAAGGAVHTRGLDFACDIYIWAPLAGTCGVLLLSLVITLYCCSRAARGTIGARRTGQPLKEDPSAVPVFSVDYGELDFQWREKTPEPPVPCVPEQTEYATIVFPSGMGTSSPARRGSADGPRSAQPLRPEDGHCSWPLRRKRGSGEGRGSLLTCGDVEENPGPMALPVTALLLPLALLLHAARPEVQLVESGGGLVQPGGSLRLSCAASGFNIKDTYIHWVRQAPGKGLEWVARIYPTNGYTRYADSVKGRFTISADTSKNTAYLQMNSLRAEDTAVYYCSRWGGDGFYAMDYWGQGTLVTVSSGSTSGSGKPGSGEGSTKGDIQMTQSPSSLSASVGDRVTITCRASQDVNTAVAWYQQKPGKAPKLLIYSASFLYSGVPSRFSGSRSGTDFTLTISSLQPEDFATYYCQQHYTTPPTFGQGTKVEIKIEVMYPPPYLDNEKSNGTIIHVKGKHLCPSPLFPGPSKPFWVLVVVGGVLACYSLLVTVAFIIFWVKRGRKKLLYIFKQPFMRPVQTTQEEDGCSCRFPEEEEGGCELRVKFSRSADAPAYQQGQNQLYNELNLGRREEYDVLDKRRGRDPEMGGKPRRKNPQEGLYNELQKDKMAEAYSEIGMKGERRRGKGHDGLYQGLSTATKDTYDALHMQALPPR

SEQ ID NO: 11 - DNA, 2837 bp, Artificial Sequence
  Synthetic
atggcactgccagtgaccgccctgctgctgcctctggccctgctgctgcacgcagccagaccccaagtgcaactagtccaatcaggtggaggcgtcgtgcaacctggagggtccctccgcgttagctgcgccgcatcaggcgttaccttgtcagactacggcatgcattgggttaggcaagcccccggcaaggggctcgaatggatggctttcattcggaatgacgggagcgataaatattacgcggattcagttaaagggcggttcaccatcagccgcgacaatagcaaaaagacggtctccttacagatgtccagcttgcgggccgaagacacggctgtatactattgtgctaaaaatggcgagagcggccccctggattactggtactttgacctgtggggcagaggcaccctggtcacggtgtcctctggaggaggaggctccggaggaggaggctctggcggcggcggcagcgacattgtaatgacccagtcaccctccttccttagtgcctcagtcggagaccgcgtgactatcacttgtcgtgcctcacacggaattaataactacctcgcttggtatcagcaaaaaccaggcaaggccccgaaactattgatctacgccgcatctactctgcagagcggagtaccgagcagatttagtggttccggcagcggaaccgagttcaccctaaccatttccagtttgcagccagaggatttcgcgacctattactgccagcaatacgattcatacccgccaactttcggaagaggtaccaaggttgaaatcaagactacgaccccagcacctagacctcccaccccagctccaactatagcttcccagccattgtctctccggccagaggcgtgtcgaccagccgctggaggggccgttcatacaagaggactcgatttcgcttgcgatatctacatatgggcccctcttgccgggacatgcggtgtcctgcttctaagcttggttattaccctctattgctgcagcagggccgcccgcggcaccatcggcgccaggcgcacaggccagcctctgaaggaggacccttccgccgtgccagtgttctctgtggactacggcgagctggattttcagtggcgggagaaaaccccagagccacctgtgccctgcgtgcctgagcagaccgagtatgccacaatcgtgtttccatccggaatgggcacaagctcccctgcaaggagaggcagcgccgacggaccacggtccgcccagccactgcggcccgaggatggccactgttcttggcccctgcggagaaagcgtggatccggggaaggccgaggctcccttctaacatgtggagatgtcgaggaaaaccctggccctatggcgctgccagtcactgcattgttattgcctctggccctgcttctccatgcggcgcgcccagaagtgcagctggtcgagagcggaggcggactggttcaacccggaggcagcttgagactgtcctgcgcggccagcggcttcaacatcaaggatacctatatccactgggtgaggcaggctccaggaaagggcctggagtgggtggcaaggatttaccctactaatggatatacacgctacgctgattccgtgaagggacgctttacaatctcagcagatacatccaaaaacacggcctatttacagatgaatagtttgcgggccgaagacacggctgtatactattgttctcggtgggggggcgatggattttatgcgatggattactggggccagggcaccctggtaaccgtgtcaagcggctcaacatccgggtccggtaagccgggctccggcgaggggtctacaaagggagatatacagatgacacagtcccccagttccctgtccgcctcagtgggagaccgagtgacgattacctgtcgtgccagccaggacgtcaataccgccgtcgcttggtatcagcaaaaaccaggcaaggccccgaaactattgatctacagtgcctcttttctgtactccggggtgccgagcagatttagtggctccaggagcggaaccgatttcaccctaaccatttccagtttgcagccagaggatttcgcgacctattactgccagcaacactacaccacaccgccaactttcggacaaggaaccaaggttgaaatcaaaattgaagttatgtatcctcctccttacctagacaatgagaagagcaatggaaccattatccatgtgaaagggaaacacctttgtccaagtcccctatttcccgggccttcgaagcccttttgggtgctggtggtggttggtggagtcctggcttgctatagcttgctagtaacagtagcgtttattattttctgggtgaaacgcggccgcaagaaactgctctacatctttaaacagccgttcatgaggcctgtgcagacaacgcaggaagaggatggctgtagttgtcggtttccggaagaggaagaggggggctgcgagttgcgtgtcaaattttctcggtctgccgacgcccccgcgtaccagcaagggcagaaccagctttataatgagctgaatcttggacgacgggaggaatatgacgtgcttgacaagaggcgaggtagggaccctgagatggggggaaaacctcggaggaaaaacccacaggaaggcctgtataacgaactgcagaaggacaagatggctgaagcctactctgagattggaatgaaaggggaacgcagacgcggcaagggccatgatggcctctaccaaggtctaagcactgccaccaaggacacctatgacgcactccacatgcaagctctacctccccgttgataamc

SEQ ID NO: 12 - protein, 943 aa, Artificial Sequence
  Synthetic
MALPVTALLLPLALLLHAARPQVQLVQSGGGVVQPGGSLRVSCAASGVTLSDYGMHWVRQAPGKGLEWMAFIRNDGSDKYYADSVKGRFTISRDNSKKTVSLQMSSLRAEDTAVYYCAKNGESGPLDYWYFDLWGRGTLVTVSSGGGGSGGGGSGGGGSDIVMTQSPSFLSASVGDRVTITCRASHGINNYLAWYQQKPGKAPKLLIYAASTLQSGVPSRFSGSGSGTEFTLTISSLQPEDFATYYCQQYDSYPPTFGRGTKVEIKTTTPAPRPPTPAPTIASQPLSLRPEACRPAAGGAVHTRGLDFACDIYIWAPLAGTCGVLLLSLVITLYCCSRAARGTIGARRTGQPLKEDPSAVPVFSVDYGELDFQWREKTPEPPVPCVPEQTEYATIVFPSGMGTSSPARRGSADGPRSAQPLRPEDGHCSWPLRRKRGSGEGRGSLLTCGDVEENPGPMALPVTALLLPLALLLHAARPEVQLVESGGGLVQPGGSLRLSCAASGFNIKDTYIHWVRQAPGKGLEWVARIYPTNGYTRYADSVKGRFTISADTSKNTAYLQMNSLRAEDTAVYYCSRWGGDGFYAMDYWGQGTLVTVSSGSTSGSGKPGSGEGSTKGDIQMTQSPSSLSASVGDRVTITCRASQDVNTAVAWYQQKPGKAPKLLIYSASFLYSGVPSRFSGSRSGTDFTLTISSLQPEDFATYYCQQHYTTPPTFGQGTKVEIKIEVMYPPPYLDNEKSNGTIIHVKGKHLCPSPLFPGPSKPFWVLVVVGGVLACYSLLVTVAFIIFWVKRGRKKLLYIFKQPFMRPVQTTQEEDGCSCRFPEEEEGGCELRVKFSRSADAPAYQQGQNQLYNELNLGRREEYDVLDKRRGRDPEMGGKPRRKNPQEGLYNELQKDKMAEAYSEIGMKGERRRGKGHDGLYQGLSTATKDTYDALHMQALPPR

SEQ ID NO: 13 - DNA, 2829 bp, Artificial Sequence
  Synthetic
atggcactgccagtgaccgccctgctgctgcctctggccctgctgctgcacgcagccagaccccaggtgcagctgcagcagtctggacctgagctggtgaagccaggagcctccgtgaagatgtcttgcaaggccagcggctacaccttcacatcttatcacatccagtgggtgaagcagcggcccggacagggcctggagtggatcggatggatctacccaggcgacggctccacacagtataacgagaagttcaagggcaagaccacactgaccgccgataagagcagcagcaccgcctacatgctgctgagcagcctgaccagcgaggacagcgccatctacttttgcgccagggagggcacatactatgctatggactattggggccagggcaccagcgtgacagtgtctagcggaggaggaggctccggaggaggaggctctggcggcggcggcagcgacgtgctgatgacccagacaccactgagcctgcccgtgagcctgggcgatcaggtgagcatctcctgtagatcctctcagagcatcgtgcactccaacggcaatacctacctggagtggtatctgcagaagccaggccagtcccccaagctgctgatctataaggtgtctaatcggttcagcggcgtgcctgacagattttctggcagcggctccggcaccgacttcaccctgaagatcagccgggtggaggcagaggatctgggcgtgtactattgtttccagggctcccacgtgccacgcacctttggcggcggtaccaagctggagatcaagactacgaccccagcacctagacctcccaccccagctccaactatagcttcccagccattgtctctccggccagaggcgtgtcgaccagccgctggaggggccgttcatacaagaggactcgatttcgcttgcgatatctacatatgggcccctcttgccgggacatgcggtgtcctgcttctaagcttggttattaccctctattgctgcagcagggccgcccgcggcaccatcggcgccaggcgcacaggccagcctctgaaggaggacccttccgccgtgccagtgttctctgtggactacggcgagctggattttcagtggcgggagaaaaccccagagccacctgtgccctgcgtgcctgagcagaccgagtatgccacaatcgtgtttccatccggaatgggcacaagctcccctgcaaggagaggcagcgccgacggaccacggtccgcccagccactgcggcccgaggatggccactgttcttggcccctgcggagaaagcgtggatccggggaaggccgaggctcccttctaacatgtggagatgtcgaggaaaaccctggccctatggcgctgccagtcactgcattgttattgcctctggccctgcttctccatgcggcgcgcccacaagtgcagctgaaacagagcggaccaggactggttcaacccagccagagcttgagcatcacgtgcacggttagcggcttcagtctgaccaattatggtgtgcactgggtgaggcagtctccaggaaagggcctggagtggcttggagtcatttggagcggtgggaatacagattacaatacaccttttacgtcacgtctctccattaacaaggacaactccaaatcccaagtatttttcaaaatgaatagcctgcagagtaatgataccgccatctattactgtgcacgagctttgacatattacgactatgaatttgcctattggggtcaaggcacgctggtgaccgtatcaggctcaacatccgggtccggtaagccgggctccggcgaggggtctacaaagggagacatccttctgacacagagccccgtgatcctgtccgtgtcccccggcgagagagtatcattttcctgtagggcttctcagagcatcggaacaaatatccactggtatcagcaacggactaacggatcacctcgcctgctcataaagtacgccagtgaatctattagtggcataccgagccgcttcagcgggagtggctccggcacagactttactctgagtataaattccgtggaatctgaggacatcgcggactattactgccagcaaaacaataactggcccaccacgttcggcgcgggaactaaactagaactaaagattgaagttatgtatcctcctccttacctagacaatgagaagagcaatggaaccattatccatgtgaaagggaaacacctttgtccaagtcccctatttcccgggccttcgaagcccttttgggtgctggtggtggttggtggagtcctggcttgctatagcttgctagtaacagtagcgtttattattttctgggtgaaacgcggccgcaagaaactgctctacatctttaaacagccgttcatgaggcctgtgcagacaacgcaggaagaggatggctgtagttgtcggtttccggaagaggaagaggggggctgcgagttgcgtgtcaaattttctcggtctgccgacgcccccgcgtaccagcaagggcagaaccagctttataatgagctgaatcttggacgacgggaggaatatgacgtgcttgacaagaggcgaggtagggaccctgagatggggggaaaacctcggaggaaaaacccacaggaaggcctgtataacgaactgcagaaggacaagatggctgaagcctactctgagattggaatgaaaggggaacgcagacgcggcaagggccatgatggcctctaccaaggtctaagcactgccaccaaggacacctatgacgcactccacatgcaagctctacctccccgttgataa

SEQ ID NO: 14 - protein, 941 aa, Artificial Sequence
  Synthetic
MALPVTALLLPLALLLHAARPQVQLQQSGPELVKPGASVKMSCKASGYTFTSYHIQWVKQRPGQGLEWIGWIYPGDGSTQYNEKFKGKTTLTADKSSSTAYMLLSSLTSEDSAIYFCAREGTYYAMDYWGQGTSVTVSSGGGGSGGGGSGGGGSDVLMTQTPLSLPVSLGDQVSISCRSSQSIVHSNGNTYLEWYLQKPGQSPKLLIYKVSNRFSGVPDRFSGSGSGTDFTLKISRVEAEDLGVYYCFQGSHVPRTFGGGTKLEIKTTTPAPRPPTPAPTIASQPLSLRPEACRPAAGGAVHTRGLDFACDIYIWAPLAGTCGVLLLSLVITLYCCSRAARGTIGARRTGQPLKEDPSAVPVFSVDYGELDFQWREKTPEPPVPCVPEQTEYATIVFPSGMGTSSPARRGSADGPRSAQPLRPEDGHCSWPLRRKRGSGEGRGSLLTCGDVEENPGPMALPVTALLLPLALLLHAARPQVQLKQSGPGLVQPSQSLSITCTVSGFSLTNYGVHWVRQSPGKGLEWLGVIWSGGNTDYNTPFTSRLSINKDNSKSQVFFKMNSLQSNDTAIYYCARALTYYDYEFAYWGQGTLVTVSGSTSGSGKPGSGEGSTKGDILLTQSPVILSVSPGERVSFSCRASQSIGTNIHWYQQRTNGSPRLLIKYASESISGIPSRFSGSGSGTDFTLSINSVESEDIADYYCQQNNNWPTTFGAGTKLELKIEVMYPPPYLDNEKSNGTIIHVKGKHLCPSPLFPGPSKPFWVLVVVGGVLACYSLLVTVAFIIFWVKRGRKKLLYIFKQPFMRPVQTTQEEDGCSCRFPEEEEGGCELRVKFSRSADAPAYQQGQNQLYNELNLGRREEYDVLDKRRGRDPEMGGKPRRKNPQEGLYNELQKDKMAEAYSEIGMKGERRRGKGHDGLYQGLSTATKDTYDALHMQALPPR

SEQ ID NO: 15 - DNA, 2829 bp, Artificial Sequence
  Synthetic
atggcactgccagtgaccgccctgctgctgcctctggccctgctgctgcacgcagccagaccccaagtgcaactagtccaatcaggtggaggcgtcgtgcaacctggagggtccctccgcgttagctgcgccgcatcaggcgttaccttgtcagactacggcatgcattgggttaggcaagcccccggcaaggggctcgaatggatggctttcattcggaatgacgggagcgataaatattacgcggattcagttaaagggcggttcaccatcagccgcgacaatagcaaaaagacggtctccttacagatgtccagcttgcgggccgaagacacggctgtatactattgtgctaaaaatggcgagagcggccccctggattactggtactttgacctgtggggcagaggcaccctggtcacggtgtcctctggaggaggaggctccggaggaggaggctctggcggcggcggcagcgacattgtaatgacccagtcaccctccttccttagtgcctcagtcggagaccgcgtgactatcacttgtcgtgcctcacacggaattaataactacctcgcttggtatcagcaaaaaccaggcaaggccccgaaactattgatctacgccgcatctactctgcagagcggagtaccgagcagatttagtggttccggcagcggaaccgagttcaccctaaccatttccagtttgcagccagaggatttcgcgacctattactgccagcaatacgattcatacccgccaactttcggaagaggtaccaaggttgaaatcaagactacgaccccagcacctagacctcccaccccagctccaactatagcttcccagccattgtctctccggccagaggcgtgtcgaccagccgctggaggggccgttcatacaagaggactcgatttcgcttgcgatatctacatatgggcccctcttgccgggacatgcggtgtcctgcttctaagcttggttattaccctctattgctgcagcagggccgcccgcggcaccatcggcgccaggcgcacaggccagcctctgaaggaggacccttccgccgtgccagtgttctctgtggactacggcgagctggattttcagtggcgggagaaaaccccagagccacctgtgccctgcgtgcctgagcagaccgagtatgccacaatcgtgtttccatccggaatgggcacaagctcccctgcaaggagaggcagcgccgacggaccacggtccgcccagccactgcggcccgaggatggccactgttcttggcccctgcggagaaagcgtggatccggggaaggccgaggctcccttctaacatgtggagatgtcgaggaaaaccctggccctatggcgctgccagtcactgcattgttattgcctctggccctgcttctccatgcggcgcgcccacaagtgcagctgaaacagagcggaccaggactggttcaacccagccagagcttgagcatcacgtgcacggttagcggcttcagtctgaccaattatggtgtgcactgggtgaggcagtctccaggaaagggcctggagtggcttggagtcatttggagcggtgggaatacagattacaatacaccttttacgtcacgtctctccattaacaaggacaactccaaatcccaagtatttttcaaaatgaatagcctgcagagtaatgataccgccatctattactgtgcacgagctttgacatattacgactatgaatttgcctattggggtcaaggcacgctggtgaccgtatcaggctcaacatccgggtccggtaagccgggctccggcgaggggtctacaaagggagacatccttctgacacagagccccgtgatcctgtccgtgtcccccggcgagagagtatcattttcctgtagggcttctcagagcatcggaacaaatatccactggtatcagcaacggactaacggatcacctcgcctgctcataaagtacgccagtgaatctattagtggcataccgagccgcttcagcgggagtggctccggcacagactttactctgagtataaattccgtggaatctgaggacatcgcggactattactgccagcaaaacaataactggcccaccacgttcggcgcgggaactaaactagaactaaagattgaagttatgtatcctcctccttacctagacaatgagaagagcaatggaaccattatccatgtgaaagggaaacacctttgtccaagtcccctatttcccgggccttcgaagcccttttgggtgctggtggtggttggtggagtcctggcttgctatagcttgctagtaacagtagcgtttattattttctgggtgaaacgcggccgcaagaaactgctctacatctttaaacagccgttcatgaggcctgtgcagacaacgcaggaagaggatggctgtagttgtcggtttccggaagaggaagaggggggctgcgagttgcgtgtcaaattttctcggtctgccgacgcccccgcgtaccagcaagggcagaaccagctttataatgagctgaatcttggacgacgggaggaatatgacgtgcttgacaagaggcgaggtagggaccctgagatggggggaaaacctcggaggaaaaacccacaggaaggcctgtataacgaactgcagaaggacaagatggctgaagcctactctgagattggaatgaaaggggaacgcagacgcggcaagggccatgatggcctctaccaaggtctaagcactgccaccaaggacacctatgacgcactccacatgcaagctctacctccccgttgataa

SEQ ID NO: 16 - protein, 941 aa, Artificial Sequence
  Synthetic
MALPVTALLLPLALLLHAARPQVQLVQSGGGVVQPGGSLRVSCAASGVTLSDYGMHWVRQAPGKGLEWMAFIRNDGSDKYYADSVKGRFTISRDNSKKTVSLQMSSLRAEDTAVYYCAKNGESGPLDYWYFDLWGRGTLVTVSSGGGGSGGGGSGGGGSDIVMTQSPSFLSASVGDRVTITCRASHGINNYLAWYQQKPGKAPKLLIYAASTLQSGVPSRFSGSGSGTEFTLTISSLQPEDFATYYCQQYDSYPPTFGRGTKVEIKTTTPAPRPPTPAPTIASQPLSLRPEACRPAAGGAVHTRGLDFACDIYIWAPLAGTCGVLLLSLVITLYCCSRAARGTIGARRTGQPLKEDPSAVPVFSVDYGELDFQWREKTPEPPVPCVPEQTEYATIVFPSGMGTSSPARRGSADGPRSAQPLRPEDGHCSWPLRRKRGSGEGRGSLLTCGDVEENPGPMALPVTALLLPLALLLHAARPQVQLKQSGPGLVQPSQSLSITCTVSGFSLTNYGVHWVRQSPGKGLEWLGVIWSGGNTDYNTPFTSRLSINKDNSKSQVFFKMNSLQSNDTAIYYCARALTYYDYEFAYWGQGTLVTVSGSTSGSGKPGSGEGSTKGDILLTQSPVILSVSPGERVSFSCRASQSIGTNIHWYQQRTNGSPRLLIKYASESISGIPSRFSGSGSGTDFTLSINSVESEDIADYYCQQNNNWPTTFGAGTKLELKIEVMYPPPYLDNEKSNGTIIHVKGKHLCPSPLFPGPSKPFWVLVVVGGVLACYSLLVTVAFIIFWVKRGRKKLLYIFKQPFMRPVQTTQEEDGCSCRFPEEEEGGCELRVKFSRSADAPAYQQGQNQLYNELNLGRREEYDVLDKRRGRDPEMGGKPRRKNPQEGLYNELQKDKMAEAYSEIGMKGERRRGKGHDGLYQGLSTATKDTYDALHMQALPPR

SEQ ID NO: 17 - DNA, 2544 bp, Artificial Sequence
  Synthetic
atggcactgccagtgaccgccctgctgctgcctctggccctgctgctgcacgcagccagaccccaggtgcagctgcagcagtctggacctgagctggtgaagccaggagcctccgtgaagatgtcttgcaaggccagcggctacaccttcacatcttatcacatccagtgggtgaagcagcggcccggacagggcctggagtggatcggatggatctacccaggcgacggctccacacagtataacgagaagttcaagggcaagaccacactgaccgccgataagagcagcagcaccgcctacatgctgctgagcagcctgaccagcgaggacagcgccatctacttttgcgccagggagggcacatactatgctatggactattggggccagggcaccagcgtgacagtgtctagcggaggaggaggctccggaggaggaggctctggcggcggcggcagcgacgtgctgatgacccagacaccactgagcctgcccgtgagcctgggcgatcaggtgagcatctcctgtagatcctctcagagcatcgtgcactccaacggcaatacctacctggagtggtatctgcagaagccaggccagtcccccaagctgctgatctataaggtgtctaatcggttcagcggcgtgcctgacagattttctggcagcggctccggcaccgacttcaccctgaagatcagccgggtggaggcagaggatctgggcgtgtactattgtttccagggctcccacgtgccacgcacctttggcggcggtaccaagctggagatcaagattgaagttatgtatcctcctccttacctagacaatgagaagagcaatggaaccattatccatgtgaaagggaaacacctttgtccaagtcccctatttcccgggccttcgaagcccttttgggtgctggtggtggttggtggagtcctggcttgctatagcttgctagtaacagtagcgtttattattttctgggtgcggagaaagcgtggatccggggaaggccgaggctcccttctaacatgtggagatgtcgaggaaaaccctggccctatggcgctgccagtcactgcattgttattgcctctggccctgcttctccatgcggcgcgcccagaagtgcagctggtcgagagcggaggcggactggttcaacccggaggcagcttgagactgtcctgcgcggccagcggcttcaacatcaaggatacctatatccactgggtgaggcaggctccaggaaagggcctggagtgggtggcaaggatttaccctactaatggatatacacgctacgctgattccgtgaagggacgctttacaatctcagcagatacatccaaaaacacggcctatttacagatgaatagtttgcgggccgaagacacggctgtatactattgttctcggtgggggggcgatggattttatgcgatggattactggggccagggcaccctggtaaccgtgtcaagcggctcaacatccgggtccggtaagccgggctccggcgaggggtctacaaagggagatatacagatgacacagtcccccagttccctgtccgcctcagtgggagaccgagtgacgattacctgtcgtgccagccaggacgtcaataccgccgtcgcttggtatcagcaaaaaccaggcaaggccccgaaactattgatctacagtgcctcttttctgtactccggggtgccgagcagatttagtggctccaggagcggaaccgatttcaccctaaccatttccagtttgcagccagaggatttcgcgacctattactgccagcaacactacaccacaccgccaactttcggacaaggaaccaaggttgaaatcaaaactacgaccccagcacctagacctcccaccccagctccaactatagcttcccagccattgtctctccggccagaggcgtgtcgaccagccgctggaggggccgttcatacaagaggactcgatttcgcttgcgatatctacatatgggcccctcttgccgggacatgcggtgtcctgcttctaagcttggttattaccctctattgcaaacgcggccgcaagaaactgctctacatctttaaacagccgttcatgaggcctgtgcagacaacgcaggaagaggatggctgtagttgtcggtttccggaagaggaagaggggggctgcgagttgcgtgtcaaattttctcggtctgccgacgcccccgcgtaccagcaagggcagaaccagctttataatgagctgaatcttggacgacgggaggaatatgacgtgcttgacaagaggcgaggtagggaccctgagatggggggaaaacctcggaggaaaaacccacaggaaggcctgtataacgaactgcagaaggacaagatggctgaagcctactctgagattggaatgaaaggggaacgcagacgcggcaagggccatgatggcctctaccaaggtctaagcactgccaccaaggacacctatgacgcactccacatgcaagctctacctccccgttgataa

SEQ ID NO: 18 - protein, 846 aa, Artificial Sequence
  Synthetic
MALPVTALLLPLALLLHAARPQVQLQQSGPELVKPGASVKMSCKASGYTFTSYHIQWVKQRPGQGLEWIGWIYPGDGSTQYNEKFKGKTTLTADKSSSTAYMLLSSLTSEDSAIYFCAREGTYYAMDYWGQGTSVTVSSGGGGSGGGGSGGGGSDVLMTQTPLSLPVSLGDQVSISCRSSQSIVHSNGNTYLEWYLQKPGQSPKLLIYKVSNRFSGVPDRFSGSGSGTDFTLKISRVEAEDLGVYYCFQGSHVPRTFGGGTKLEIKIEVMYPPPYLDNEKSNGTIIHVKGKHLCPSPLFPGPSKPFWVLVVVGGVLACYSLLVTVAFIIFWVRRKRGSGEGRGSLLTCGDVEENPGPMALPVTALLLPLALLLHAARPEVQLVESGGGLVQPGGSLRLSCAASGFNIKDTYIHWVRQAPGKGLEWVARIYPTNGYTRYADSVKGRFTISADTSKNTAYLQMNSLRAEDTAVYYCSRWGGDGFYAMDYWGQGTLVTVSSGSTSGSGKPGSGEGSTKGDIQMTQSPSSLSASVGDRVTITCRASQDVNTAVAWYQQKPGKAPKLLIYSASFLYSGVPSRFSGSRSGTDFTLTISSLQPEDFATYYCQQHYTTPPTFGQGTKVEIKTTTPAPRPPTPAPTIASQPLSLRPEACRPAAGGAVHTRGLDFACDIYIWAPLAGTCGVLLLSLVITLYCKRGRKKLLYIFKQPFMRPVQTTQEEDGCSCRFPEEEEGGCELRVKFSRSADAPAYQQGQNQLYNELNLGRREEYDVLDKRRGRDPEMGGKPRRKNPQEGLYNELQKDKMAEAYSEIGMKGERRRGKGHDGLYQGLSTATKDTYDALHMQALPPR

SEQ ID NO: 19 - DNA, 2544 bp, Artificial Sequence
  Synthetic
atggcactgccagtgaccgccctgctgctgcctctggccctgctgctgcacgcagccagaccccaagtgcaactagtccaatcaggtggaggcgtcgtgcaacctggagggtccctccgcgttagctgcgccgcatcaggcgttaccttgtcagactacggcatgcattgggttaggcaagcccccggcaaggggctcgaatggatggctttcattcggaatgacgggagcgataaatattacgcggattcagttaaagggcggttcaccatcagccgcgacaatagcaaaaagacggtctccttacagatgtccagcttgcgggccgaagacacggctgtatactattgtgctaaaaatggcgagagcggccccctggattactggtactttgacctgtggggcagaggcaccctggtcacggtgtcctctggaggaggaggctccggaggaggaggctctggcggcggcggcagcgacattgtaatgacccagtcaccctccttccttagtgcctcagtcggagaccgcgtgactatcacttgtcgtgcctcacacggaattaataactacctcgcttggtatcagcaaaaaccaggcaaggccccgaaactattgatctacgccgcatctactctgcagagcggagtaccgagcagatttagtggttccggcagcggaaccgagttcaccctaaccatttccagtttgcagccagaggatttcgcgacctattactgccagcaatacgattcatacccgccaactttcggaagaggtaccaaggttgaaatcaagattgaagttatgtatcctcctccttacctagacaatgagaagagcaatggaaccattatccatgtgaaagggaaacacctttgtccaagtcccctatttcccgggccttcgaagcccttttgggtgctggtggtggttggtggagtcctggcttgctatagcttgctagtaacagtagcgtttattattttctgggtgcggagaaagcgtggatccggggaaggccgaggctcccttctaacatgtggagatgtcgaggaaaaccctggccctatggcgctgccagtcactgcattgttattgcctctggccctgcttctccatgcggcgcgcccagaagtgcagctggtcgagagcggaggcggactggttcaacccggaggcagcttgagactgtcctgcgcggccagcggcttcaacatcaaggatacctatatccactgggtgaggcaggctccaggaaagggcctggagtgggtggcaaggatttaccctactaatggatatacacgctacgctgattccgtgaagggacgctttacaatctcagcagatacatccaaaaacacggcctatttacagatgaatagtttgcgggccgaagacacggctgtatactattgttctcggtgggggggcgatggattttatgcgatggattactggggccagggcaccctggtaaccgtgtcaagcggctcaacatccgggtccggtaagccgggctccggcgaggggtctacaaagggagatatacagatgacacagtcccccagttccctgtccgcctcagtgggagaccgagtgacgattacctgtcgtgccagccaggacgtcaataccgccgtcgcttggtatcagcaaaaaccaggcaaggccccgaaactattgatctacagtgcctcttttctgtactccggggtgccgagcagatttagtggctccaggagcggaaccgatttcaccctaaccatttccagtttgcagccagaggatttcgcgacctattactgccagcaacactacaccacaccgccaactttcggacaaggaaccaaggttgaaatcaaaactacgaccccagcacctagacctcccaccccagctccaactatagcttcccagccattgtctctccggccagaggcgtgtcgaccagccgctggaggggccgttcatacaagaggactcgatttcgcttgcgatatctacatatgggcccctcttgccgggacatgcggtgtcctgcttctaagcttggttattaccctctattgcaaacgcggccgcaagaaactgctctacatctttaaacagccgttcatgaggcctgtgcagacaacgcaggaagaggatggctgtagttgtcggtttccggaagaggaagaggggggctgcgagttgcgtgtcaaattttctcggtctgccgacgcccccgcgtaccagcaagggcagaaccagctttataatgagctgaatcttggacgacgggaggaatatgacgtgcttgacaagaggcgaggtagggaccctgagatggggggaaaacctcggaggaaaaacccacaggaaggcctgtataacgaactgcagaaggacaagatggctgaagcctactctgagattggaatgaaaggggaacgcagacgcggcaagggccatgatggcctctaccaaggtctaagcactgccaccaaggacacctatgacgcactccacatgcaagctctacctccccgttgataa

SEQ ID NO: 20 - protein, 846 aa, Artificial Sequence
  Synthetic
MALPVTALLLPLALLLHAARPQVQLVQSGGGVVQPGGSLRVSCAASGVTLSDYGMHWVRQAPGKGLEWMAFIRNDGSDKYYADSVKGRFTISRDNSKKTVSLQMSSLRAEDTAVYYCAKNGESGPLDYWYFDLWGRGTLVTVSSGGGGSGGGGSGGGGSDIVMTQSPSFLSASVGDRVTITCRASHGINNYLAWYQQKPGKAPKLLIYAASTLQSGVPSRFSGSGSGTEFTLTISSLQPEDFATYYCQQYDSYPPTFGRGTKVEIKIEVMYPPPYLDNEKSNGTIIHVKGKHLCPSPLFPGPSKPFWVLVVVGGVLACYSLLVTVAFIIFWVRRKRGSGEGRGSLLTCGDVEENPGPMALPVTALLLPLALLLHAARPEVQLVESGGGLVQPGGSLRLSCAASGFNIKDTYIHWVRQAPGKGLEWVARIYPTNGYTRYADSVKGRFTISADTSKNTAYLQMNSLRAEDTAVYYCSRWGGDGFYAMDYWGQGTLVTVSSGSTSGSGKPGSGEGSTKGDIQMTQSPSSLSASVGDRVTITCRASQDVNTAVAWYQQKPGKAPKLLIYSASFLYSGVPSRFSGSRSGTDFTLTISSLQPEDFATYYCQQHYTTPPTFGQGTKVEIKTTTPAPRPPTPAPTIASQPLSLRPEACRPAAGGAVHTRGLDFACDIYIWAPLAGTCGVLLLSLVITLYCKRGRKKLLYIFKQPFMRPVQTTQEEDGCSCRFPEEEEGGCELRVKFSRSADAPAYQQGQNQLYNELNLGRREEYDVLDKRRGRDPEMGGKPRRKNPQEGLYNELQKDKMAEAYSEIGMKGERRRGKGHDGLYQGLSTATKDTYDALHMQALPPR

SEQ ID NO: 21 - DNA, 3048 bp, Artificial Sequence
  Synthetic
atggcactgccagtgaccgccctgctgctgcctctggccctgctgctgcacgcagccagaccccaagtgcaactagtccaatcaggtggaggcgtcgtgcaacctggagggtccctccgcgttagctgcgccgcatcaggcgttaccttgtcagactacggcatgcattgggttaggcaagcccccggcaaggggctcgaatggatggctttcattcggaatgacgggagcgataaatattacgcggattcagttaaagggcggttcaccatcagccgcgacaatagcaaaaagacggtctccttacagatgtccagcttgcgggccgaagacacggctgtatactattgtgctaaaaatggcgagagcggccccctggattactggtactttgacctgtggggcagaggcaccctggtcacggtgtcctctggaggaggaggctccggaggaggaggctctggcggcggcggcagcgacattgtaatgacccagtcaccctccttccttagtgcctcagtcggagaccgcgtgactatcacttgtcgtgcctcacacggaattaataactacctcgcttggtatcagcaaaaaccaggcaaggccccgaaactattgatctacgccgcatctactctgcagagcggagtaccgagcagatttagtggttccggcagcggaaccgagttcaccctaaccatttccagtttgcagccagaggatttcgcgacctattactgccagcaatacgattcatacccgccaactttcggaagaggtaccaaggttgaaatcaagattgaagttatgtatcctcctccttacctagacaatgagaagagcaatggaaccattatccatgtgaaagggaaacacctttgtccaagtcccctatttcccgggccttcgaagcccttttgggtgctggtggtggttggtggagtcctggcttgctatagcttgctagtaacagtagcgtttattattttctgggtgctgcgccacaggagacagggcaagcactggaccagcacccagcggaaggccgactttcagcaccctgccggcgccgtgggccctgagcctaccgacaggggcctgcagtggaggagctccccagccgccgatgcccaggaggagaatctgtacgccgccgtgaagcacacccagccagaggacggcgtggagatggacacccgctccccacacgacgaggatccacaggccgtgacctacgccgaggtgaagcacagccgccccagacgcgagatggccagcccacccagccccctgtccggcgagttcctggacaccaaggacaggcaggccgaggaggaccggcagatggacaccgaggccgccgcctccgaggccccccaggacgtgacctacgcccagctgcactccctgaccctgcggagagaggccaccgagcccccacccagccaggagggcccctcccccgccgtgcctagcatctacgccaccctggccatccaccggagaaagcgtggatccggggaaggccgaggctcccttctaacatgtggagatgtcgaggaaaaccctggccctatggcgctgccagtcactgcattgttattgcctctggccctgcttctccatgcggcgcgcccagaagtgcagctggtcgagagcggaggcggactggttcaacccggaggcagcttgagactgtcctgcgcggccagcggcttcaacatcaaggatacctatatccactgggtgaggcaggctccaggaaagggcctggagtgggtggcaaggatttaccctactaatggatatacacgctacgctgattccgtgaagggacgctttacaatctcagcagatacatccaaaaacacggcctatttacagatgaatagtttgcgggccgaagacacggctgtatactattgttctcggtgggggggcgatggattttatgcgatggattactggggccagggcaccctggtaaccgtgtcaagcggctcaacatccgggtccggtaagccgggctccggcgaggggtctacaaagggagatatacagatgacacagtcccccagttccctgtccgcctcagtgggagaccgagtgacgattacctgtcgtgccagccaggacgtcaataccgccgtcgcttggtatcagcaaaaaccaggcaaggccccgaaactattgatctacagtgcctcttttctgtactccggggtgccgagcagatttagtggctccaggagcggaaccgatttcaccctaaccatttccagtttgcagccagaggatttcgcgacctattactgccagcaacactacaccacaccgccaactttcggacaaggaaccaaggttgaaatcaaaactacgaccccagcacctagacctcccaccccagctccaactatagcttcccagccattgtctctccggccagaggcgtgtcgaccagccgctggaggggccgttcatacaagaggactcgatttcgcttgcgatatctacatatgggcccctcttgccgggacatgcggtgtcctgcttctaagcttggttattaccctctattgcaaacgcggccgcaagaaactgctctacatctttaaacagccgttcatgaggcctgtgcagacaacgcaggaagaggatggctgtagttgtcggtttccggaagaggaagaggggggctgcgagttgcgtgtcaaattttctcggtctgccgacgcccccgcgtaccagcaagggcagaaccagctttataatgagctgaatcttggacgacgggaggaatatgacgtgcttgacaagaggcgaggtagggaccctgagatggggggaaaacctcggaggaaaaacccacaggaaggcctgtataacgaactgcagaaggacaagatggctgaagcctactctgagattggaatgaaaggggaacgcagacgcggcaagggccatgatggcctctaccaaggtctaagcactgccaccaaggacacctatgacgcactccacatgcaagctctacctccccgttgataa

SEQ ID NO: 22 - protein, 1014 aa, Artificial Sequence
  Synthetic
MALPVTALLLPLALLLHAARPQVQLVQSGGGVVQPGGSLRVSCAASGVTLSDYGMHWVRQAPGKGLEWMAFIRNDGSDKYYADSVKGRFTISRDNSKKTVSLQMSSLRAEDTAVYYCAKNGESGPLDYWYFDLWGRGTLVTVSSGGGGSGGGGSGGGGSDIVMTQSPSFLSASVGDRVTITCRASHGINNYLAWYQQKPGKAPKLLIYAASTLQSGVPSRFSGSGSGTEFTLTISSLQPEDFATYYCQQYDSYPPTFGRGTKVEIKIEVMYPPPYLDNEKSNGTIIHVKGKHLCPSPLFPGPSKPFWVLVVVGGVLACYSLLVTVAFIIFWVLRHRRQGKHWTSTQRKADFQHPAGAVGPEPTDRGLQWRSSPAADAQEENLYAAVKHTQPEDGVEMDTRSPHDEDPQAVTYAEVKHSRPRREMASPPSPLSGEFLDTKDRQAEEDRQMDTEAAASEAPQDVTYAQLHSLTLRREATEPPPSQEGPSPAVPSIYATLAIHRRKRGSGEGRGSLLTCGDVEENPGPMALPVTALLLPLALLLHAARPEVQLVESGGGLVQPGGSLRLSCAASGFNIKDTYIHWVRQAPGKGLEWVARIYPTNGYTRYADSVKGRFTISADTSKNTAYLQMNSLRAEDTAVYYCSRWGGDGFYAMDYWGQGTLVTVSSGSTSGSGKPGSGEGSTKGDIQMTQSPSSLSASVGDRVTITCRASQDVNTAVAWYQQKPGKAPKLLIYSASFLYSGVPSRFSGSRSGTDFTLTISSLQPEDFATYYCQQHYTTPPTFGQGTKVEIKTTTPAPRPPTPAPTIASQPLSLRPEACRPAAGGAVHTRGLDFACDIYIWAPLAGTCGVLLLSLVITLYCKRGRKKLLYIFKQPFMRPVQTTQEEDGCSCRFPEEEEGGCELRVKFSRSADAPAYQQGQNQLYNELNLGRREEYDVLDKRRGRDPEMGGKPRRKNPQEGLYNELQKDKMAEAYSEIGMKGERRRGKGHDGLYQGLSTATKDTYDALHMQALPPR

SEQ ID NO: 23 - DNA, 2796 bp, Artificial Sequence
  Synthetic
atggcactgccagtgaccgccctgctgctgcctctggccctgctgctgcacgcagccagaccccaagtgcaactagtccaatcaggtggaggcgtcgtgcaacctggagggtccctccgcgttagctgcgccgcatcaggcgttaccttgtcagactacggcatgcattgggttaggcaagcccccggcaaggggctcgaatggatggctttcattcggaatgacgggagcgataaatattacgcggattcagttaaagggcggttcaccatcagccgcgacaatagcaaaaagacggtctccttacagatgtccagcttgcgggccgaagacacggctgtatactattgtgctaaaaatggcgagagcggccccctggattactggtactttgacctgtggggcagaggcaccctggtcacggtgtcctctggaggaggaggctccggaggaggaggctctggcggcggcggcagcgacattgtaatgacccagtcaccctccttccttagtgcctcagtcggagaccgcgtgactatcacttgtcgtgcctcacacggaattaataactacctcgcttggtatcagcaaaaaccaggcaaggccccgaaactattgatctacgccgcatctactctgcagagcggagtaccgagcagatttagtggttccggcagcggaaccgagttcaccctaaccatttccagtttgcagccagaggatttcgcgacctattactgccagcaatacgattcatacccgccaactttcggaagaggtaccaaggttgaaatcaagattgaagttatgtatcctcctccttacctagacaatgagaagagcaatggaaccattatccatgtgaaagggaaacacctttgtccaagtcccctatttcccgggccttcgaagcccttttgggtgctggtggtggttggtggagtcctggcttgctatagcttgctagtaacagtagcgtttattattttctgggtgcataggtggtgctcaaacaaaaagaatgctgccgtcatggaccaggagagcgcgggcaatcggaccgcaaactcagaggactcagatgaacaagatccacaggaagtgacctacactcagctgaaccattgtgtgtttacacagcgcaagattactcgtccaagccagcgtcctaagacccccccgaccgatatcattgtgtataccgagcttcctaatgccgaatcccgcagcaaggtggtctcctgcccgcggagaaagcgtggatccggggaaggccgaggctcccttctaacatgtggagatgtcgaggaaaaccctggccctatggcgctgccagtcactgcattgttattgcctctggccctgcttctccatgcggcgcgcccagaagtgcagctggtcgagagcggaggcggactggttcaacccggaggcagcttgagactgtcctgcgcggccagcggcttcaacatcaaggatacctatatccactgggtgaggcaggctccaggaaagggcctggagtgggtggcaaggatttaccctactaatggatatacacgctacgctgattccgtgaagggacgctttacaatctcagcagatacatccaaaaacacggcctatttacagatgaatagtttgcgggccgaagacacggctgtatactattgttctcggtgggggggcgatggattttatgcgatggattactggggccagggcaccctggtaaccgtgtcaagcggctcaacatccgggtccggtaagccgggctccggcgaggggtctacaaagggagatatacagatgacacagtcccccagttccctgtccgcctcagtgggagaccgagtgacgattacctgtcgtgccagccaggacgtcaataccgccgtcgcttggtatcagcaaaaaccaggcaaggccccgaaactattgatctacagtgcctcttttctgtactccggggtgccgagcagatttagtggctccaggagcggaaccgatttcaccctaaccatttccagtttgcagccagaggatttcgcgacctattactgccagcaacactacaccacaccgccaactttcggacaaggaaccaaggttgaaatcaaaactacgaccccagcacctagacctcccaccccagctccaactatagcttcccagccattgtctctccggccagaggcgtgtcgaccagccgctggaggggccgttcatacaagaggactcgatttcgcttgcgatatctacatatgggcccctcttgccgggacatgcggtgtcctgcttctaagcttggttattaccctctattgcaaacgcggccgcaagaaactgctctacatctttaaacagccgttcatgaggcctgtgcagacaacgcaggaagaggatggctgtagttgtcggtttccggaagaggaagaggggggctgcgagttgcgtgtcaaattttctcggtctgccgacgcccccgcgtaccagcaagggcagaaccagctttataatgagctgaatcttggacgacgggaggaatatgacgtgcttgacaagaggcgaggtagggaccctgagatggggggaaaacctcggaggaaaaacccacaggaaggcctgtataacgaactgcagaaggacaagatggctgaagcctactctgagattggaatgaaaggggaacgcagacgcggcaagggccatgatggcctctaccaaggtctaagcactgccaccaaggacacctatgacgcactccacatgcaagctctacctccccgttgataa

SEQ ID NO: 24 - protein, 930 aa, Artificial Sequence
  Synthetic
MALPVTALLLPLALLLHAARPQVQLVQSGGGVVQPGGSLRVSCAASGVTLSDYGMHWVRQAPGKGLEWMAFIRNDGSDKYYADSVKGRFTISRDNSKKTVSLQMSSLRAEDTAVYYCAKNGESGPLDYWYFDLWGRGTLVTVSSGGGGSGGGGSGGGGSDIVMTQSPSFLSASVGDRVTITCRASHGINNYLAWYQQKPGKAPKLLIYAASTLQSGVPSRFSGSGSGTEFTLTISSLQPEDFATYYCQQYDSYPPTFGRGTKVEIKIEVMYPPPYLDNEKSNGTIIHVKGKHLCPSPLFPGPSKPFWVLVVVGGVLACYSLLVTVAFIIFWVHRWCSNKKNAAVMDQESAGNRTANSEDSDEQDPQEVTYTQLNHCVFTQRKITRPSQRPKTPPTDIIVYTELPNAESRSKVVSCPRRKRGSGEGRGSLLTCGDVEENPGPMALPVTALLLPLALLLHAARPEVQLVESGGGLVQPGGSLRLSCAASGFNIKDTYIHWVRQAPGKGLEWVARIYPTNGYTRYADSVKGRFTISADTSKNTAYLQMNSLRAEDTAVYYCSRWGGDGFYAMDYWGQGTLVTVSSGSTSGSGKPGSGEGSTKGDIQMTQSPSSLSASVGDRVTITCRASQDVNTAVAWYQQKPGKAPKLLIYSASFLYSGVPSRFSGSRSGTDFTLTISSLQPEDFATYYCQQHYTTPPTFGQGTKVEIKTTTPAPRPPTPAPTIASQPLSLRPEACRPAAGGAVHTRGLDFACDIYIWAPLAGTCGVLLLSLVITLYCKRGRKKLLYIFKQPFMRPVQTTQEEDGCSCRFPEEEEGGCELRVKFSRSADAPAYQQGQNQLYNELNLGRREEYDVLDKRRGRDPEMGGKPRRKNPQEGLYNELQKDKMAEAYSEIGMKGERRRGKGHDGLYQGLSTATKDTYDALHMQALPPR

SEQ ID NO: 25 - DNA, 3048 bp, Artificial Sequence
  Synthetic
atggcactgccagtgaccgccctgctgctgcctctggccctgctgctgcacgcagccagaccccaggtgcagctgcagcagtctggacctgagctggtgaagccaggagcctccgtgaagatgtcttgcaaggccagcggctacaccttcacatcttatcacatccagtgggtgaagcagcggcccggacagggcctggagtggatcggatggatctacccaggcgacggctccacacagtataacgagaagttcaagggcaagaccacactgaccgccgataagagcagcagcaccgcctacatgctgctgagcagcctgaccagcgaggacagcgccatctacttttgcgccagggagggcacatactatgctatggactattggggccagggcaccagcgtgacagtgtctagcggaggaggaggctccggaggaggaggctctggcggcggcggcagcgacgtgctgatgacccagacaccactgagcctgcccgtgagcctgggcgatcaggtgagcatctcctgtagatcctctcagagcatcgtgcactccaacggcaatacctacctggagtggtatctgcagaagccaggccagtcccccaagctgctgatctataaggtgtctaatcggttcagcggcgtgcctgacagattttctggcagcggctccggcaccgacttcaccctgaagatcagccgggtggaggcagaggatctgggcgtgtactattgtttccagggctcccacgtgccacgcacctttggcggcggtaccaagctggagatcaagattgaagttatgtatcctcctccttacctagacaatgagaagagcaatggaaccattatccatgtgaaagggaaacacctttgtccaagtcccctatttcccgggccttcgaagcccttttgggtgctggtggtggttggtggagtcctggcttgctatagcttgctagtaacagtagcgtttattattttctgggtgctgcgccacaggagacagggcaagcactggaccagcacccagcggaaggccgactttcagcaccctgccggcgccgtgggccctgagcctaccgacaggggcctgcagtggaggagctccccagccgccgatgcccaggaggagaatctgtacgccgccgtgaagcacacccagccagaggacggcgtggagatggacacccgctccccacacgacgaggatccacaggccgtgacctacgccgaggtgaagcacagccgccccagacgcgagatggccagcccacccagccccctgtccggcgagttcctggacaccaaggacaggcaggccgaggaggaccggcagatggacaccgaggccgccgcctccgaggccccccaggacgtgacctacgcccagctgcactccctgaccctgcggagagaggccaccgagcccccacccagccaggagggcccctcccccgccgtgcctagcatctacgccaccctggccatccaccggagaaagcgtggatccggggaaggccgaggctcccttctaacatgtggagatgtcgaggaaaaccctggccctatggcgctgccagtcactgcattgttattgcctctggccctgcttctccatgcggcgcgcccagaagtgcagctggtcgagagcggaggcggactggttcaacccggaggcagcttgagactgtcctgcgcggccagcggcttcaacatcaaggatacctatatccactgggtgaggcaggctccaggaaagggcctggagtgggtggcaaggatttaccctactaatggatatacacgctacgctgattccgtgaagggacgctttacaatctcagcagatacatccaaaaacacggcctatttacagatgaatagtttgcgggccgaagacacggctgtatactattgttctcggtgggggggcgatggattttatgcgatggattactggggccagggcaccctggtaaccgtgtcaagcggctcaacatccgggtccggtaagccgggctccggcgaggggtctacaaagggagatatacagatgacacagtcccccagttccctgtccgcctcagtgggagaccgagtgacgattacctgtcgtgccagccaggacgtcaataccgccgtcgcttggtatcagcaaaaaccaggcaaggccccgaaactattgatctacagtgcctcttttctgtactccggggtgccgagcagatttagtggctccaggagcggaaccgatttcaccctaaccatttccagtttgcagccagaggatttcgcgacctattactgccagcaacactacaccacaccgccaactttcggacaaggaaccaaggttgaaatcaaaactacgaccccagcacctagacctcccaccccagctccaactatagcttcccagccattgtctctccggccagaggcgtgtcgaccagccgctggaggggccgttcatacaagaggactcgatttcgcttgcgatatctacatatgggcccctcttgccgggacatgcggtgtcctgcttctaagcttggttattaccctctattgcaaacgcggccgcaagaaactgctctacatctttaaacagccgttcatgaggcctgtgcagacaacgcaggaagaggatggctgtagttgtcggtttccggaagaggaagaggggggctgcgagttgcgtgtcaaattttctcggtctgccgacgcccccgcgtaccagcaagggcagaaccagctttataatgagctgaatcttggacgacgggaggaatatgacgtgcttgacaagaggcgaggtagggaccctgagatggggggaaaacctcggaggaaaaacccacaggaaggcctgtataacgaactgcagaaggacaagatggctgaagcctactctgagattggaatgaaaggggaacgcagacgcggcaagggccatgatggcctctaccaaggtctaagcactgccaccaaggacacctatgacgcactccacatgcaagctctacctccccgttgataa

SEQ ID NO: 26 - protein, 1014 aa, Artificial Sequence
  Synthetic
MALPVTALLLPLALLLHAARPQVQLQQSGPELVKPGASVKMSCKASGYTFTSYHIQWVKQRPGQGLEWIGWIYPGDGSTQYNEKFKGKTTLTADKSSSTAYMLLSSLTSEDSAIYFCAREGTYYAMDYWGQGTSVTVSSGGGGSGGGGSGGGGSDVLMTQTPLSLPVSLGDQVSISCRSSQSIVHSNGNTYLEWYLQKPGQSPKLLIYKVSNRFSGVPDRFSGSGSGTDFTLKISRVEAEDLGVYYCFQGSHVPRTFGGGTKLEIKIEVMYPPPYLDNEKSNGTIIHVKGKHLCPSPLFPGPSKPFWVLVVVGGVLACYSLLVTVAFIIFWVLRHRRQGKHWTSTQRKADFQHPAGAVGPEPTDRGLQWRSSPAADAQEENLYAAVKHTQPEDGVEMDTRSPHDEDPQAVTYAEVKHSRPRREMASPPSPLSGEFLDTKDRQAEEDRQMDTEAAASEAPQDVTYAQLHSLTLRREATEPPPSQEGPSPAVPSIYATLAIHRRKRGSGEGRGSLLTCGDVEENPGPMALPVTALLLPLALLLHAARPEVQLVESGGGLVQPGGSLRLSCAASGFNIKDTYIHWVRQAPGKGLEWVARIYPTNGYTRYADSVKGRFTISADTSKNTAYLQMNSLRAEDTAVYYCSRWGGDGFYAMDYWGQGTLVTVSSGSTSGSGKPGSGEGSTKGDIQMTQSPSSLSASVGDRVTITCRASQDVNTAVAWYQQKPGKAPKLLIYSASFLYSGVPSRFSGSRSGTDFTLTISSLQPEDFATYYCQQHYTTPPTFGQGTKVEIKTTTPAPRPPTPAPTIASQPLSLRPEACRPAAGGAVHTRGLDFACDIYIWAPLAGTCGVLLLSLVITLYCKRGRKKLLYIFKQPFMRPVQTTQEEDGCSCRFPEEEEGGCELRVKFSRSADAPAYQQGQNQLYNELNLGRREEYDVLDKRRGRDPEMGGKPRRKNPQEGLYNELQKDKMAEAYSEIGMKGERRRGKGHDGLYQGLSTATKDTYDALHMQALPPR

SEQ ID NO: 27 - DNA, 2796 bp, Artificial Sequence
  Synthetic
atggcactgccagtgaccgccctgctgctgcctctggccctgctgctgcacgcagccagaccccaggtgcagctgcagcagtctggacctgagctggtgaagccaggagcctccgtgaagatgtcttgcaaggccagcggctacaccttcacatcttatcacatccagtgggtgaagcagcggcccggacagggcctggagtggatcggatggatctacccaggcgacggctccacacagtataacgagaagttcaagggcaagaccacactgaccgccgataagagcagcagcaccgcctacatgctgctgagcagcctgaccagcgaggacagcgccatctacttttgcgccagggagggcacatactatgctatggactattggggccagggcaccagcgtgacagtgtctagcggaggaggaggctccggaggaggaggctctggcggcggcggcagcgacgtgctgatgacccagacaccactgagcctgcccgtgagcctgggcgatcaggtgagcatctcctgtagatcctctcagagcatcgtgcactccaacggcaatacctacctggagtggtatctgcagaagccaggccagtcccccaagctgctgatctataaggtgtctaatcggttcagcggcgtgcctgacagattttctggcagcggctccggcaccgacttcaccctgaagatcagccgggtggaggcagaggatctgggcgtgtactattgtttccagggctcccacgtgccacgcacctttggcggcggtaccaagctggagatcaagattgaagttatgtatcctcctccttacctagacaatgagaagagcaatggaaccattatccatgtgaaagggaaacacctttgtccaagtcccctatttcccgggccttcgaagcccttttgggtgctggtggtggttggtggagtcctggcttgctatagcttgctagtaacagtagcgtttattattttctgggtgcataggtggtgctcaaacaaaaagaatgctgccgtcatggaccaggagagcgcgggcaatcggaccgcaaactcagaggactcagatgaacaagatccacaggaagtgacctacactcagctgaaccattgtgtgtttacacagcgcaagattactcgtccaagccagcgtcctaagacccccccgaccgatatcattgtgtataccgagcttcctaatgccgaatcccgcagcaaggtggtctcctgcccgcggagaaagcgtggatccggggaaggccgaggctcccttctaacatgtggagatgtcgaggaaaaccctggccctatggcgctgccagtcactgcattgttattgcctctggccctgcttctccatgcggcgcgcccagaagtgcagctggtcgagagcggaggcggactggttcaacccggaggcagcttgagactgtcctgcgcggccagcggcttcaacatcaaggatacctatatccactgggtgaggcaggctccaggaaagggcctggagtgggtggcaaggatttaccctactaatggatatacacgctacgctgattccgtgaagggacgctttacaatctcagcagatacatccaaaaacacggcctatttacagatgaatagtttgcgggccgaagacacggctgtatactattgttctcggtgggggggcgatggattttatgcgatggattactggggccagggcaccctggtaaccgtgtcaagcggctcaacatccgggtccggtaagccgggctccggcgaggggtctacaaagggagatatacagatgacacagtcccccagttccctgtccgcctcagtgggagaccgagtgacgattacctgtcgtgccagccaggacgtcaataccgccgtcgcttggtatcagcaaaaaccaggcaaggccccgaaactattgatctacagtgcctcttttctgtactccggggtgccgagcagatttagtggctccaggagcggaaccgatttcaccctaaccatttccagtttgcagccagaggatttcgcgacctattactgccagcaacactacaccacaccgccaactttcggacaaggaaccaaggttgaaatcaaaactacgaccccagcacctagacctcccaccccagctccaactatagcttcccagccattgtctctccggccagaggcgtgtcgaccagccgctggaggggccgttcatacaagaggactcgatttcgcttgcgatatctacatatgggcccctcttgccgggacatgcggtgtcctgcttctaagcttggttattaccctctattgcaaacgcggccgcaagaaactgctctacatctttaaacagccgttcatgaggcctgtgcagacaacgcaggaagaggatggctgtagttgtcggtttccggaagaggaagaggggggctgcgagttgcgtgtcaaattttctcggtctgccgacgcccccgcgtaccagcaagggcagaaccagctttataatgagctgaatcttggacgacgggaggaatatgacgtgcttgacaagaggcgaggtagggaccctgagatggggggaaaacctcggaggaaaaacccacaggaaggcctgtataacgaactgcagaaggacaagatggctgaagcctactctgagattggaatgaaaggggaacgcagacgcggcaagggccatgatggcctctaccaaggtctaagcactgccaccaaggacacctatgacgcactccacatgcaagctctacctccccgttgataa

SEQ ID NO: 28 - protein, 930 aa, Artificial Sequence
  Synthetic
MALPVTALLLPLALLLHAARPQVQLQQSGPELVKPGASVKMSCKASGYTFTSYHIQWVKQRPGQGLEWIGWIYPGDGSTQYNEKFKGKTTLTADKSSSTAYMLLSSLTSEDSAIYFCAREGTYYAMDYWGQGTSVTVSSGGGGSGGGGSGGGGSDVLMTQTPLSLPVSLGDQVSISCRSSQSIVHSNGNTYLEWYLQKPGQSPKLLIYKVSNRFSGVPDRFSGSGSGTDFTLKISRVEAEDLGVYYCFQGSHVPRTFGGGTKLEIKIEVMYPPPYLDNEKSNGTIIHVKGKHLCPSPLFPGPSKPFWVLVVVGGVLACYSLLVTVAFIIFWVHRWCSNKKNAAVMDQESAGNRTANSEDSDEQDPQEVTYTQLNHCVFTQRKITRPSQRPKTPPTDIIVYTELPNAESRSKVVSCPRRKRGSGEGRGSLLTCGDVEENPGPMALPVTALLLPLALLLHAARPEVQLVESGGGLVQPGGSLRLSCAASGFNIKDTYIHWVRQAPGKGLEWVARIYPTNGYTRYADSVKGRFTISADTSKNTAYLQMNSLRAEDTAVYYCSRWGGDGFYAMDYWGQGTLVTVSSGSTSGSGKPGSGEGSTKGDIQMTQSPSSLSASVGDRVTITCRASQDVNTAVAWYQQKPGKAPKLLIYSASFLYSGVPSRFSGSRSGTDFTLTISSLQPEDFATYYCQQHYTTPPTFGQGTKVEIKTTTPAPRPPTPAPTIASQPLSLRPEACRPAAGGAVHTRGLDFACDIYIWAPLAGTCGVLLLSLVITLYCKRGRKKLLYIFKQPFMRPVQTTQEEDGCSCRFPEEEEGGCELRVKFSRSADAPAYQQGQNQLYNELNLGRREEYDVLDKRRGRDPEMGGKPRRKNPQEGLYNELQKDKMAEAYSEIGMKGERRRGKGHDGLYQGLSTATKDTYDALHMQALPPR

SEQ ID NO: 29 - DNA, 3048 bp, Artificial Sequence
  Synthetic
atggcactgccagtgaccgccctgctgctgcctctggccctgctgctgcacgcagccagaccccaagtgcaactagtccaatcaggtggaggcgtcgtgcaacctggagggtccctccgcgttagctgcgccgcatcaggcgttaccttgtcagactacggcatgcattgggttaggcaagcccccggcaaggggctcgaatggatggctttcattcggaatgacgggagcgataaatattacgcggattcagttaaagggcggttcaccatcagccgcgacaatagcaaaaagacggtctccttacagatgtccagcttgcgggccgaagacacggctgtatactattgtgctaaaaatggcgagagcggccccctggattactggtactttgacctgtggggcagaggcaccctggtcacggtgtcctctggaggaggaggctccggaggaggaggctctggcggcggcggcagcgacattgtaatgacccagtcaccctccttccttagtgcctcagtcggagaccgcgtgactatcacttgtcgtgcctcacacggaattaataactacctcgcttggtatcagcaaaaaccaggcaaggccccgaaactattgatctacgccgcatctactctgcagagcggagtaccgagcagatttagtggttccggcagcggaaccgagttcaccctaaccatttccagtttgcagccagaggatttcgcgacctattactgccagcaatacgattcatacccgccaactttcggaagaggtaccaaggttgaaatcaagactacgaccccagcacctagacctcccaccccagctccaactatagcttcccagccattgtctctccggccagaggcgtgtcgaccagccgctggaggggccgttcatacaagaggactcgatttcgcttgcgatatctacatatgggcccctcttgccgggacatgcggtgtcctgcttctaagcttggttattaccctctattgcctgcgccacaggagacagggcaagcactggaccagcacccagcggaaggccgactttcagcaccctgccggcgccgtgggccctgagcctaccgacaggggcctgcagtggaggagctccccagccgccgatgcccaggaggagaatctgtacgccgccgtgaagcacacccagccagaggacggcgtggagatggacacccgctccccacacgacgaggatccacaggccgtgacctacgccgaggtgaagcacagccgccccagacgcgagatggccagcccacccagccccctgtccggcgagttcctggacaccaaggacaggcaggccgaggaggaccggcagatggacaccgaggccgccgcctccgaggccccccaggacgtgacctacgcccagctgcactccctgaccctgcggagagaggccaccgagcccccacccagccaggagggcccctcccccgccgtgcctagcatctacgccaccctggccatccaccggagaaagcgtggatccggggaaggccgaggctcccttctaacatgtggagatgtcgaggaaaaccctggccctatggcgctgccagtcactgcattgttattgcctctggccctgcttctccatgcggcgcgcccagaagtgcagctggtcgagagcggaggcggactggttcaacccggaggcagcttgagactgtcctgcgcggccagcggcttcaacatcaaggatacctatatccactgggtgaggcaggctccaggaaagggcctggagtgggtggcaaggatttaccctactaatggatatacacgctacgctgattccgtgaagggacgctttacaatctcagcagatacatccaaaaacacggcctatttacagatgaatagtttgcgggccgaagacacggctgtatactattgttctcggtgggggggcgatggattttatgcgatggattactggggccagggcaccctggtaaccgtgtcaagcggctcaacatccgggtccggtaagccgggctccggcgaggggtctacaaagggagatatacagatgacacagtcccccagttccctgtccgcctcagtgggagaccgagtgacgattacctgtcgtgccagccaggacgtcaataccgccgtcgcttggtatcagcaaaaaccaggcaaggccccgaaactattgatctacagtgcctcttttctgtactccggggtgccgagcagatttagtggctccaggagcggaaccgatttcaccctaaccatttccagtttgcagccagaggatttcgcgacctattactgccagcaacactacaccacaccgccaactttcggacaaggaaccaaggttgaaatcaaaattgaagttatgtatcctcctccttacctagacaatgagaagagcaatggaaccattatccatgtgaaagggaaacacctttgtccaagtcccctatttcccgggccttcgaagcccttttgggtgctggtggtggttggtggagtcctggcttgctatagcttgctagtaacagtagcgtttattattttctgggtgaaacgcggccgcaagaaactgctctacatctttaaacagccgttcatgaggcctgtgcagacaacgcaggaagaggatggctgtagttgtcggtttccggaagaggaagaggggggctgcgagttgcgtgtcaaattttctcggtctgccgacgcccccgcgtaccagcaagggcagaaccagctttataatgagctgaatcttggacgacgggaggaatatgacgtgcttgacaagaggcgaggtagggaccctgagatggggggaaaacctcggaggaaaaacccacaggaaggcctgtataacgaactgcagaaggacaagatggctgaagcctactctgagattggaatgaaaggggaacgcagacgcggcaagggccatgatggcctctaccaaggtctaagcactgccaccaaggacacctatgacgcactccacatgcaagctctacctccccgttgataa

SEQ ID NO: 30 - protein, 1014 aa, Artificial Sequence
  Synthetic
MALPVTALLLPLALLLHAARPQVQLVQSGGGVVQPGGSLRVSCAASGVTLSDYGMHWVRQAPGKGLEWMAFIRNDGSDKYYADSVKGRFTISRDNSKKTVSLQMSSLRAEDTAVYYCAKNGESGPLDYWYFDLWGRGTLVTVSSGGGGSGGGGSGGGGSDIVMTQSPSFLSASVGDRVTITCRASHGINNYLAWYQQKPGKAPKLLIYAASTLQSGVPSRFSGSGSGTEFTLTISSLQPEDFATYYCQQYDSYPPTFGRGTKVEIKTTTPAPRPPTPAPTIASQPLSLRPEACRPAAGGAVHTRGLDFACDIYIWAPLAGTCGVLLLSLVITLYCLRHRRQGKHWTSTQRKADFQHPAGAVGPEPTDRGLQWRSSPAADAQEENLYAAVKHTQPEDGVEMDTRSPHDEDPQAVTYAEVKHSRPRREMASPPSPLSGEFLDTKDRQAEEDRQMDTEAAASEAPQDVTYAQLHSLTLRREATEPPPSQEGPSPAVPSIYATLAIHRRKRGSGEGRGSLLTCGDVEENPGPMALPVTALLLPLALLLHAARPEVQLVESGGGLVQPGGSLRLSCAASGFNIKDTYIHWVRQAPGKGLEWVARIYPTNGYTRYADSVKGRFTISADTSKNTAYLQMNSLRAEDTAVYYCSRWGGDGFYAMDYWGQGTLVTVSSGSTSGSGKPGSGEGSTKGDIQMTQSPSSLSASVGDRVTITCRASQDVNTAVAWYQQKPGKAPKLLIYSASFLYSGVPSRFSGSRSGTDFTLTISSLQPEDFATYYCQQHYTTPPTFGQGTKVEIKIEVMYPPPYLDNEKSNGTIIHVKGKHLCPSPLFPGPSKPFWVLVVVGGVLACYSLLVTVAFIIFWVKRGRKKLLYIFKQPFMRPVQTTQEEDGCSCRFPEEEEGGCELRVKFSRSADAPAYQQGQNQLYNELNLGRREEYDVLDKRRGRDPEMGGKPRRKNPQEGLYNELQKDKMAEAYSEIGMKGERRRGKGHDGLYQGLSTATKDTYDALHMQALPPR

SEQ ID NO: 31 - DNA, 2796 bp, Artificial Sequence
  Synthetic
atggcactgccagtgaccgccctgctgctgcctctggccctgctgctgcacgcagccagaccccaagtgcaactagtccaatcaggtggaggcgtcgtgcaacctggagggtccctccgcgttagctgcgccgcatcaggcgttaccttgtcagactacggcatgcattgggttaggcaagcccccggcaaggggctcgaatggatggctttcattcggaatgacgggagcgataaatattacgcggattcagttaaagggcggttcaccatcagccgcgacaatagcaaaaagacggtctccttacagatgtccagcttgcgggccgaagacacggctgtatactattgtgctaaaaatggcgagagcggccccctggattactggtactttgacctgtggggcagaggcaccctggtcacggtgtcctctggaggaggaggctccggaggaggaggctctggcggcggcggcagcgacattgtaatgacccagtcaccctccttccttagtgcctcagtcggagaccgcgtgactatcacttgtcgtgcctcacacggaattaataactacctcgcttggtatcagcaaaaaccaggcaaggccccgaaactattgatctacgccgcatctactctgcagagcggagtaccgagcagatttagtggttccggcagcggaaccgagttcaccctaaccatttccagtttgcagccagaggatttcgcgacctattactgccagcaatacgattcatacccgccaactttcggaagaggtaccaaggttgaaatcaagactacgaccccagcacctagacctcccaccccagctccaactatagcttcccagccattgtctctccggccagaggcgtgtcgaccagccgctggaggggccgttcatacaagaggactcgatttcgcttgcgatatctacatatgggcccctcttgccgggacatgcggtgtcctgcttctaagcttggttattaccctctattgccataggtggtgctcaaacaaaaagaatgctgccgtcatggaccaggagagcgcgggcaatcggaccgcaaactcagaggactcagatgaacaagatccacaggaagtgacctacactcagctgaaccattgtgtgtttacacagcgcaagattactcgtccaagccagcgtcctaagacccccccgaccgatatcattgtgtataccgagcttcctaatgccgaatcccgcagcaaggtggtctcctgcccgcggagaaagcgtggatccggggaaggccgaggctcccttctaacatgtggagatgtcgaggaaaaccctggccctatggcgctgccagtcactgcattgttattgcctctggccctgcttctccatgcggcgcgcccagaagtgcagctggtcgagagcggaggcggactggttcaacccggaggcagcttgagactgtcctgcgcggccagcggcttcaacatcaaggatacctatatccactgggtgaggcaggctccaggaaagggcctggagtgggtggcaaggatttaccctactaatggatatacacgctacgctgattccgtgaagggacgctttacaatctcagcagatacatccaaaaacacggcctatttacagatgaatagtttgcgggccgaagacacggctgtatactattgttctcggtgggggggcgatggattttatgcgatggattactggggccagggcaccctggtaaccgtgtcaagcggctcaacatccgggtccggtaagccgggctccggcgaggggtctacaaagggagatatacagatgacacagtcccccagttccctgtccgcctcagtgggagaccgagtgacgattacctgtcgtgccagccaggacgtcaataccgccgtcgcttggtatcagcaaaaaccaggcaaggccccgaaactattgatctacagtgcctcttttctgtactccggggtgccgagcagatttagtggctccaggagcggaaccgatttcaccctaaccatttccagtttgcagccagaggatttcgcgacctattactgccagcaacactacaccacaccgccaactttcggacaaggaaccaaggttgaaatcaaaattgaagttatgtatcctcctccttacctagacaatgagaagagcaatggaaccattatccatgtgaaagggaaacacctttgtccaagtcccctatttcccgggccttcgaagcccttttgggtgctggtggtggttggtggagtcctggcttgctatagcttgctagtaacagtagcgtttattattttctgggtgaaacgcggccgcaagaaactgctctacatctttaaacagccgttcatgaggcctgtgcagacaacgcaggaagaggatggctgtagttgtcggtttccggaagaggaagaggggggctgcgagttgcgtgtcaaattttctcggtctgccgacgcccccgcgtaccagcaagggcagaaccagctttataatgagctgaatcttggacgacgggaggaatatgacgtgcttgacaagaggcgaggtagggaccctgagatggggggaaaacctcggaggaaaaacccacaggaaggcctgtataacgaactgcagaaggacaagatggctgaagcctactctgagattggaatgaaaggggaacgcagacgcggcaagggccatgatggcctctaccaaggtctaagcactgccaccaaggacacctatgacgcactccacatgcaagctctacctccccgttgataa

SEQ ID NO: 32 - protein, 930 aa, Artificial Sequence
  Synthetic
MALPVTALLLPLALLLHAARPQVQLVQSGGGVVQPGGSLRVSCAASGVTLSDYGMHWVRQAPGKGLEWMAFIRNDGSDKYYADSVKGRFTISRDNSKKTVSLQMSSLRAEDTAVYYCAKNGESGPLDYWYFDLWGRGTLVTVSSGGGGSGGGGSGGGGSDIVMTQSPSFLSASVGDRVTITCRASHGINNYLAWYQQKPGKAPKLLIYAASTLQSGVPSRFSGSGSGTEFTLTISSLQPEDFATYYCQQYDSYPPTFGRGTKVEIKTTTPAPRPPTPAPTIASQPLSLRPEACRPAAGGAVHTRGLDFACDIYIWAPLAGTCGVLLLSLVITLYCHRWCSNKKNAAVMDQESAGNRTANSEDSDEQDPQEVTYTQLNHCVFTQRKITRPSQRPKTPPTDIIVYTELPNAESRSKVVSCPRRKRGSGEGRGSLLTCGDVEENPGPMALPVTALLLPLALLLHAARPEVQLVESGGGLVQPGGSLRLSCAASGFNIKDTYIHWVRQAPGKGLEWVARIYPTNGYTRYADSVKGRFTISADTSKNTAYLQMNSLRAEDTAVYYCSRWGGDGFYAMDYWGQGTLVTVSSGSTSGSGKPGSGEGSTKGDIQMTQSPSSLSASVGDRVTITCRASQDVNTAVAWYQQKPGKAPKLLIYSASFLYSGVPSRFSGSRSGTDFTLTISSLQPEDFATYYCQQHYTTPPTFGQGTKVEIKIEVMYPPPYLDNEKSNGTIIHVKGKHLCPSPLFPGPSKPFWVLVVVGGVLACYSLLVTVAFIIFWVKRGRKKLLYIFKQPFMRPVQTTQEEDGCSCRFPEEEEGGCELRVKFSRSADAPAYQQGQNQLYNELNLGRREEYDVLDKRRGRDPEMGGKPRRKNPQEGLYNELQKDKMAEAYSEIGMKGERRRGKGHDGLYQGLSTATKDTYDALHMQALPPR

SEQ ID NO: 33 - DNA, 3048 bp, Artificial Sequence
  Synthetic
atggcactgccagtgaccgccctgctgctgcctctggccctgctgctgcacgcagccagaccccaggtgcagctgcagcagtctggacctgagctggtgaagccaggagcctccgtgaagatgtcttgcaaggccagcggctacaccttcacatcttatcacatccagtgggtgaagcagcggcccggacagggcctggagtggatcggatggatctacccaggcgacggctccacacagtataacgagaagttcaagggcaagaccacactgaccgccgataagagcagcagcaccgcctacatgctgctgagcagcctgaccagcgaggacagcgccatctacttttgcgccagggagggcacatactatgctatggactattggggccagggcaccagcgtgacagtgtctagcggaggaggaggctccggaggaggaggctctggcggcggcggcagcgacgtgctgatgacccagacaccactgagcctgcccgtgagcctgggcgatcaggtgagcatctcctgtagatcctctcagagcatcgtgcactccaacggcaatacctacctggagtggtatctgcagaagccaggccagtcccccaagctgctgatctataaggtgtctaatcggttcagcggcgtgcctgacagattttctggcagcggctccggcaccgacttcaccctgaagatcagccgggtggaggcagaggatctgggcgtgtactattgtttccagggctcccacgtgccacgcacctttggcggcggtaccaagctggagatcaagactacgaccccagcacctagacctcccaccccagctccaactatagcttcccagccattgtctctccggccagaggcgtgtcgaccagccgctggaggggccgttcatacaagaggactcgatttcgcttgcgatatctacatatgggcccctcttgccgggacatgcggtgtcctgcttctaagcttggttattaccctctattgcctgcgccacaggagacagggcaagcactggaccagcacccagcggaaggccgactttcagcaccctgccggcgccgtgggccctgagcctaccgacaggggcctgcagtggaggagctccccagccgccgatgcccaggaggagaatctgtacgccgccgtgaagcacacccagccagaggacggcgtggagatggacacccgctccccacacgacgaggatccacaggccgtgacctacgccgaggtgaagcacagccgccccagacgcgagatggccagcccacccagccccctgtccggcgagttcctggacaccaaggacaggcaggccgaggaggaccggcagatggacaccgaggccgccgcctccgaggccccccaggacgtgacctacgcccagctgcactccctgaccctgcggagagaggccaccgagcccccacccagccaggagggcccctcccccgccgtgcctagcatctacgccaccctggccatccaccggagaaagcgtggatccggggaaggccgaggctcccttctaacatgtggagatgtcgaggaaaaccctggccctatggcgctgccagtcactgcattgttattgcctctggccctgcttctccatgcggcgcgcccagaagtgcagctggtcgagagcggaggcggactggttcaacccggaggcagcttgagactgtcctgcgcggccagcggcttcaacatcaaggatacctatatccactgggtgaggcaggctccaggaaagggcctggagtgggtggcaaggatttaccctactaatggatatacacgctacgctgattccgtgaagggacgctttacaatctcagcagatacatccaaaaacacggcctatttacagatgaatagtttgcgggccgaagacacggctgtatactattgttctcggtgggggggcgatggattttatgcgatggattactggggccagggcaccctggtaaccgtgtcaagcggctcaacatccgggtccggtaagccgggctccggcgaggggtctacaaagggagatatacagatgacacagtcccccagttccctgtccgcctcagtgggagaccgagtgacgattacctgtcgtgccagccaggacgtcaataccgccgtcgcttggtatcagcaaaaaccaggcaaggccccgaaactattgatctacagtgcctcttttctgtactccggggtgccgagcagatttagtggctccaggagcggaaccgatttcaccctaaccatttccagtttgcagccagaggatttcgcgacctattactgccagcaacactacaccacaccgccaactttcggacaaggaaccaaggttgaaatcaaaattgaagttatgtatcctcctccttacctagacaatgagaagagcaatggaaccattatccatgtgaaagggaaacacctttgtccaagtcccctatttcccgggccttcgaagcccttttgggtgctggtggtggttggtggagtcctggcttgctatagcttgctagtaacagtagcgtttattattttctgggtgaaacgcggccgcaagaaactgctctacatctttaaacagccgttcatgaggcctgtgcagacaacgcaggaagaggatggctgtagttgtcggtttccggaagaggaagaggggggctgcgagttgcgtgtcaaattttctcggtctgccgacgcccccgcgtaccagcaagggcagaaccagctttataatgagctgaatcttggacgacgggaggaatatgacgtgcttgacaagaggcgaggtagggaccctgagatggggggaaaacctcggaggaaaaacccacaggaaggcctgtataacgaactgcagaaggacaagatggctgaagcctactctgagattggaatgaaaggggaacgcagacgcggcaagggccatgatggcctctaccaaggtctaagcactgccaccaaggacacctatgacgcactccacatgcaagctctacctccccgttgataa

SEQ ID NO: 34 - protein, 1014 aa, Artificial Sequence
  Synthetic
MALPVTALLLPLALLLHAARPQVQLQQSGPELVKPGASVKMSCKASGYTFTSYHIQWVKQRPGQGLEWIGWIYPGDGSTQYNEKFKGKTTLTADKSSSTAYMLLSSLTSEDSAIYFCAREGTYYAMDYWGQGTSVTVSSGGGGSGGGGSGGGGSDVLMTQTPLSLPVSLGDQVSISCRSSQSIVHSNGNTYLEWYLQKPGQSPKLLIYKVSNRFSGVPDRFSGSGSGTDFTLKISRVEAEDLGVYYCFQGSHVPRTFGGGTKLEIKTTTPAPRPPTPAPTIASQPLSLRPEACRPAAGGAVHTRGLDFACDIYIWAPLAGTCGVLLLSLVITLYCLRHRRQGKHWTSTQRKADFQHPAGAVGPEPTDRGLQWRSSPAADAQEENLYAAVKHTQPEDGVEMDTRSPHDEDPQAVTYAEVKHSRPRREMASPPSPLSGEFLDTKDRQAEEDRQMDTEAAASEAPQDVTYAQLHSLTLRREATEPPPSQEGPSPAVPSIYATLAIHRRKRGSGEGRGSLLTCGDVEENPGPMALPVTALLLPLALLLHAARPEVQLVESGGGLVQPGGSLRLSCAASGFNIKDTYIHWVRQAPGKGLEWVARIYPTNGYTRYADSVKGRFTISADTSKNTAYLQMNSLRAEDTAVYYCSRWGGDGFYAMDYWGQGTLVTVSSGSTSGSGKPGSGEGSTKGDIQMTQSPSSLSASVGDRVTITCRASQDVNTAVAWYQQKPGKAPKLLIYSASFLYSGVPSRFSGSRSGTDFTLTISSLQPEDFATYYCQQHYTTPPTFGQGTKVEIKIEVMYPPPYLDNEKSNGTIIHVKGKHLCPSPLFPGPSKPFWVLVVVGGVLACYSLLVTVAFIIFWVKRGRKKLLYIFKQPFMRPVQTTQEEDGCSCRFPEEEEGGCELRVKFSRSADAPAYQQGQNQLYNELNLGRREEYDVLDKRRGRDPEMGGKPRRKNPQEGLYNELQKDKMAEAYSEIGMKGERRRGKGHDGLYQGLSTATKDTYDALHMQALPPR

SEQ ID NO: 35 - DNA, 2796 bp, Artificial Sequence
  Synthetic
atggcactgccagtgaccgccctgctgctgcctctggccctgctgctgcacgcagccagaccccaggtgcagctgcagcagtctggacctgagctggtgaagccaggagcctccgtgaagatgtcttgcaaggccagcggctacaccttcacatcttatcacatccagtgggtgaagcagcggcccggacagggcctggagtggatcggatggatctacccaggcgacggctccacacagtataacgagaagttcaagggcaagaccacactgaccgccgataagagcagcagcaccgcctacatgctgctgagcagcctgaccagcgaggacagcgccatctacttttgcgccagggagggcacatactatgctatggactattggggccagggcaccagcgtgacagtgtctagcggaggaggaggctccggaggaggaggctctggcggcggcggcagcgacgtgctgatgacccagacaccactgagcctgcccgtgagcctgggcgatcaggtgagcatctcctgtagatcctctcagagcatcgtgcactccaacggcaatacctacctggagtggtatctgcagaagccaggccagtcccccaagctgctgatctataaggtgtctaatcggttcagcggcgtgcctgacagattttctggcagcggctccggcaccgacttcaccctgaagatcagccgggtggaggcagaggatctgggcgtgtactattgtttccagggctcccacgtgccacgcacctttggcggcggtaccaagctggagatcaagactacgaccccagcacctagacctcccaccccagctccaactatagcttcccagccattgtctctccggccagaggcgtgtcgaccagccgctggaggggccgttcatacaagaggactcgatttcgcttgcgatatctacatatgggcccctcttgccgggacatgcggtgtcctgcttctaagcttggttattaccctctattgccataggtggtgctcaaacaaaaagaatgctgccgtcatggaccaggagagcgcgggcaatcggaccgcaaactcagaggactcagatgaacaagatccacaggaagtgacctacactcagctgaaccattgtgtgtttacacagcgcaagattactcgtccaagccagcgtcctaagacccccccgaccgatatcattgtgtataccgagcttcctaatgccgaatcccgcagcaaggtggtctcctgcccgcggagaaagcgtggatccggggaaggccgaggctcccttctaacatgtggagatgtcgaggaaaaccctggccctatggcgctgccagtcactgcattgttattgcctctggccctgcttctccatgcggcgcgcccagaagtgcagctggtcgagagcggaggcggactggttcaacccggaggcagcttgagactgtcctgcgcggccagcggcttcaacatcaaggatacctatatccactgggtgaggcaggctccaggaaagggcctggagtgggtggcaaggatttaccctactaatggatatacacgctacgctgattccgtgaagggacgctttacaatctcagcagatacatccaaaaacacggcctatttacagatgaatagtttgcgggccgaagacacggctgtatactattgttctcggtgggggggcgatggattttatgcgatggattactggggccagggcaccctggtaaccgtgtcaagcggctcaacatccgggtccggtaagccgggctccggcgaggggtctacaaagggagatatacagatgacacagtcccccagttccctgtccgcctcagtgggagaccgagtgacgattacctgtcgtgccagccaggacgtcaataccgccgtcgcttggtatcagcaaaaaccaggcaaggccccgaaactattgatctacagtgcctcttttctgtactccggggtgccgagcagatttagtggctccaggagcggaaccgatttcaccctaaccatttccagtttgcagccagaggatttcgcgacctattactgccagcaacactacaccacaccgccaactttcggacaaggaaccaaggttgaaatcaaaattgaagttatgtatcctcctccttacctagacaatgagaagagcaatggaaccattatccatgtgaaagggaaacacctttgtccaagtcccctatttcccgggccttcgaagcccttttgggtgctggtggtggttggtggagtcctggcttgctatagcttgctagtaacagtagcgtttattattttctgggtgaaacgcggccgcaagaaactgctctacatctttaaacagccgttcatgaggcctgtgcagacaacgcaggaagaggatggctgtagttgtcggtttccggaagaggaagaggggggctgcgagttgcgtgtcaaattttctcggtctgccgacgcccccgcgtaccagcaagggcagaaccagctttataatgagctgaatcttggacgacgggaggaatatgacgtgcttgacaagaggcgaggtagggaccctgagatggggggaaaacctcggaggaaaaacccacaggaaggcctgtataacgaactgcagaaggacaagatggctgaagcctactctgagattggaatgaaaggggaacgcagacgcggcaagggccatgatggcctctaccaaggtctaagcactgccaccaaggacacctatgacgcactccacatgcaagctctacctccccgttgataa

SEQ ID NO: 36 - protein, 931 aa, Artificial Sequence
  Synthetic
MALPVTALLLPLALLLHAARPQVQLQQSGPELVKPGASVKMSCKASGYTFTSYHIQWVKQRPGQGLEWIGWIYPGDGSTQYNEKFKGKTTLTADKSSSTAYMLLSSLTSEDSAIYFCAREGTYYAMDYWGQGTSVTVSSGGGGSGGGGSGGGGSDVLMTQTPLSLPVSLGDQVSISCRSSQSIVHSNGNTYLEWYLQKPGQSPKLLIYKVSNRFSGVPDRFSGSGSGTDFTLKISRVEAEDLGVYYCFQGSHVPRTFGGGTKLEIKTTTPAPRPPTPAPTIASQPLSLRPEACRPAAGGAVHTRGLDFACDIYIWAPLAGTCGVLLLSLVITLYCHRWCSNKKNAAVMDQESAGNRTANSEDSDEQDPQEVTYTQLNHCVFTQRKITRPSQRPKTPPTDIIVYTELPNAESRSKVVSCPRRKRGSGEGRGSLLTCGDVEENPGPMALPVTALLLPLALLLHAARPEVQLVESGGGLLVQPGGSLRLSCAASGFNIKDTYIHWVRQAPGKGLEWVARIYPTNGYTRYADSVKGRFTISADTSKNTAYLQMNSLRAEDTAVYYCSRWGGDGFYAMDYWGQGTLVTVSSGSTSGSGKPGSGEGSTKGDIQMTQSPSSLSASVGDRVTITCRASQDVNTAVAWYQQKPGKAPKLLIYSASFLYSGVPSRFSGSRSGTDFTLTISSLQPEDFATYYCQQHYTTPPTFGQGTKVEIKIEVMYPPPYLDNEKSNGTIIHVKGKHLCPSPLFPGPSKPFWVLVVVGGVLACYSLLVTVAFIIFWVKRGRKKLLYIFKQPFMRPVQTTQEEDGCSCRFPEEEEGGCELRVKFSRSADAPAYQQGQNQLYNELNLGRREEYDVLDKRRGRDPEMGGKPRRKNPQEGLYNELQKDKMAEAYSEIGMKGERRRGKGHDGLYQGLSTATKDTYDALHMQALPPR

SEQ ID NO: 37 - protein, 112 aa, Artificial Sequence
  Synthetic
DVLMTQTPLSLPVSLGDQVSISCRSSQSIVHSNGNTYLEWYLQKPGQSPKLLIYKVSNRFSGVPDRFSGSGSGTDFTLKISRVEAEDLGVYYCFQGSHVPRTFGGGTKLEIK

SEQ ID NO: 38 - protein, 118 aa, Artificial Sequence
  Synthetic
QVQLQQSGPELVKPGASVKMSCKASGYTFTSYHIQWVKQRPGQGLEWIGWIYPGDGSTQYNEKFKGKTTLTADKSSSTAYMLLSSLTSEDSAIYFCAREGTYYAMDYWGQGTSVTVSS

SEQ ID NO: 39 - protein, 107 aa, Artificial Sequence
  Synthetic
DIVMTQSPSFLSASVGDRVTITCRASHGINNYLAWYQQKPGKAPKLLIYAASTLQSGVPSRFSGSGSGTEFTLTISSLQPEDFATYYCQQYDSYPPTFGRGTKVEIK

SEQ ID NO: 40 - protein, 123 aa, Artificial Sequence
  Synthetic
QVQLVQSGGGVVQPGGSLRVSCAASGVTLSDYGMHWVRQAPGKGLEWMAFIRNDGSDKYYADSVKGRFTISRDNSKKTVSLQMSSLRAEDTAVYYCAKNGESGPLDYWYFDLWGRGTLVTVSS

SEQ ID NO: 41 - protein, 107 aa, Artificial Sequence
  Synthetic
DVVMTQSPSSLSASVGDRVTITCQASQDISNYLNWYQQKPGKAPKLLIYDASNLETGVPSRFSGSGSGTDFTFTISSLQPEDFATYYCQQYSSFPLTFGGGTKVDIK

SEQ ID NO: 42 - protein, 123 aa, Artificial Sequence; identical to SEQ ID NO: 40
  Synthetic

SEQ ID NO: 43 - protein, 107 aa, Artificial Sequence
  Synthetic
DVVMTQSPSSLSASVGDRVTITCQASQDISNYLNWYQQKPGKAPKLLIYDASNLETGVPSRFSGSGSGTDFTFTISSLQPEDIATYYCQQYDNLPPTFGGGTKLEIV

SEQ ID NO: 44 - protein, 123 aa, Artificial Sequence; identical to SEQ ID NO: 40
  Synthetic

SEQ ID NO: 45 - protein, 108 aa, Artificial Sequence
  Synthetic
SIVMTQTPKFLLVSAGDRVTITCKASQSVSNDVAWYQQKPGQSPKLLIYYASNRYTGVPDRFTGSGYGTDFTFTISTVQAEDLAVYFCQQDYSSPPWTFGGGTKLEIR

SEQ ID NO: 46 - protein, 120 aa, Artificial Sequence
  Synthetic
QVQLKQSGPGLVQPSQSLSLTCTVSGFSLTSYGVHWVRQPPGKGLEWLGVIWSGGSTDYNAAFISRLSIRKDNSKSQVFFKMNSLQADDTAIYYCARTFTTSTSAWFAYWGQGTLVTVSA

SEQ ID NO: 47 - protein, 107 aa, Artificial Sequence
  Synthetic
DIQMTQSPASQSASLGESVTITCLASQTIGTWLAWYQQKPGKSPQLLIYAATSLADGVPSRFSGSGSGTKFSLKIRTLQAEDFVSYYCQQLYSKPYTFGGGTKLEIK

SEQ ID NO: 48 - protein, 119 aa, Artificial Sequence
  Synthetic
EVQLQQSGAELVKPGASVKLSCTPSGFNVKDTYIHWVKQRPKQGLEWIGRIDPSDGDIKYDPKFQGKATITADTSSNTVSLQLSSLTSEDTAVYYCARWFGDYGAMNYWGQGTSVTVSS

SEQ ID NO: 49 - protein, 113 aa, Artificial Sequence
  synthetic
DIVMTQSPDSLAVSLGERATISCKSSQSVLYSSNNKNYLAWYQQKLGQPPKLLIYWASTRESGVPDRFSGSGSGTNFTLTISSLQAENVAVYYCQQYYGTPFTFGGGTKVEIK

SEQ ID NO: 50 - protein, 125 aa, Artificial Sequence
  synthetic
QVQLVQSGAEVKKPGASVKVSCKASGYTFTDYYLHWVRQAPGQGLEWMGWINPYTGGTNYAQKFQGRVTMTRDASISTVYMELSGLTSDDTAVHFCARAGASYYDFWSGWVFDYWGQGTLVTVSS

SEQ ID NO: 51 - protein, 107 aa, Artificial Sequence
  synthetic
DIQMTQSPSSLSASVGDRVTITCRASQSISTYLNWYQQKPGKAPKLLIYAASSLQSGVPSRFSGSGSGTDFTLTISSLQPEDFATYQCQQSYSTPFTFGGGTKVEIK

SEQ ID NO: 52 - protein, 124 aa, Artificial Sequence
  synthetic
QVQLQESGPGLVKPSETLSLTCTVSGGSISSYYWSWIRQPAGKGLEWIGRIYISGGTNYNPSLKSRVTMSVDTSKNQVSLKLSSVTAADTAVYYCARDILGGVSGWSHYGMDVWGQGTTVTVSS

SEQ ID NO: 53 - protein, 110 aa, Artificial Sequence
  synthetic
QSALTQPPSASGSPGQSVTISCTGTSSDVGGYKYVSWYQHHPDKAPKLMIYEVNKRPSGVPDRFSGSKSDNTASLTVSGLQAEDEADYYCSSYAGSNNWVFGGGTKLTVL

SEQ ID NO: 54 - protein, 118 aa, Artificial Sequence
  synthetic
QVQLVESGGGVVQPGGSLRLSCAASGFTFSTYGMHWVRQAPGKGLEWAASVSYDGSNKYYADSGQGRFTISRDTSMNSLYLQVNSLRDETAVYYCAIGIYGAYSFDYWGQGTLVTVSS

SEQ ID NO: 55 - protein, 110 aa, Artificial Sequence; identical to SEQ ID NO: 53
  synthetic

SEQ ID NO: 56 - protein, 119 aa, Artificial Sequence
  synthetic
QVQLVESGGGVVQPGGSLRLSCAASGFTFSTYGMHWVRQAPGKGLEWVASISYDGSNKYYADSGQGRFTISRDTSKNSLYLQMNSLRAEDTAVYYCAIGIYGAYSFDYWGQGTLVTVSS

SEQ ID NO: 57 - protein, 112 aa, Artificial Sequence
  synthetic
DVVMTQTPLSLSVTPGQPASISCRSSQSIVHSNGNTYLEWYLQKPGQSPQLLIYKVSNRFSGVPDRFSGSGSGTDFTLKISRVEAEDVGVYYCFQGSHVPRTFGGGTKVEIK

SEQ ID NO: 58 - protein, 118 aa, Artificial Sequence
  synthetic
QVQLVQSGAEVKKPGSSVKVSCKASGGTFSSYHIQWVRQAPGQGLEWMGWIYPGDGSTQYNEKFKGRVTITADKSTSTAYMELSSLRSEDTAVYYCAREGTYYAMDYWGQGTLVTVSS

SEQ ID NO: 59 - protein, 112 aa, Artificial Sequence; identical to SEQ ID NO: 57
  synthetic

SEQ ID NO: 60 - protein, 118 aa, Artificial Sequence
  synthetic
QVQLVQSGAEVKKPGSSVKVSCKASGYTFTSYHIQWVRQAPGQGLEWMGWIYPGDGSTQYNEKFKGRVTITADKSTSTAYMELSSLRSEDTAVYYCAREGTYYAMDYWGQGTLVTVSS

SEQ ID NO: 61 - protein, 112 aa, Artificial Sequence; identical to SEQ ID NO: 57
  synthetic

SEQ ID NO: 62 - protein, 118 aa, Artificial Sequence
  synthetic
QVQLVQSGAEVKKPGSSVKVSCKASGYTFTSYHIQWVRQAPGQGLEWIGWIYPGDGSTQYNEKFKGRVTITADKSTSTAYMELSSLRSEDTAVYYCAREGTYYAMDYWGQGTLVTVSS

SEQ ID NO: 63 - protein, 112 aa, Artificial Sequence; identical to SEQ ID NO: 57
  synthetic

SEQ ID NO: 64 - protein, 118 aa, Artificial Sequence
  synthetic
QVQLVQSGAEVKKPGSSVKVSCKASGYTFTSYHIQWVRQAPGQGLEWMGWIYPGDGSTQYNEKFKGRTTITADKSTSTAYMELSSLRSEDTAVYYCAREGTYYAMDYWGQGTLVTVSS

SEQ ID NO: 65 - protein, 112 aa, Artificial Sequence; identical to SEQ ID NO: 57
  synthetic

SEQ ID NO: 66 - protein, 118 aa, Artificial Sequence
  synthetic
QVQLVQSGAEVKKPGSSVKVSCKASGYTFTSYHIQWVRQAPGQGLEWMGWIYPGDGSTQYNEKFKGRVTLTADKSTSTAYMELSSLRSEDTAVYYCAREGTYYAMDYWGQGTLVTVSS

SEQ ID NO: 67 - protein, 112 aa, Artificial Sequence; identical to SEQ ID NO: 57
  synthetic

SEQ ID NO: 68 - protein, 118 aa, Artificial Sequence
  synthetic
QVQLVQSGAEVKKPGSSVKVSCKASGYTFTSYHIQWVRQAPGQGLEWMGWIYPGDGSTQYNEKFKGRTTLTADKSTSTAYMELSSLRSEDTAVYYCAREGTYYAMDYWGQGTLVTVSS

SEQ ID NO: 69 - protein, 112 aa, Artificial Sequence; identical to SEQ ID NO: 57
  synthetic

SEQ ID NO: 70 - protein, 118 aa, Artificial Sequence
  synthetic
QVQLVQSGAEVKKPGASVKVSCKASGYTFTSYHIQWVRQAPGQRLEWMGWIYPGDGSTQYNEKFKGRVTITRDTSASTAYMELSSLRSEDTAVYYCAREGTYYAMDYWGQGTLVTVSS

SEQ ID NO: 71 - protein, 112 aa, Artificial Sequence; identical to SEQ ID NO: 57
  synthetic

SEQ ID NO: 72 - protein, 118 aa, Artificial Sequence
  synthetic
QVQLVQSGAEVKKPGASVKVSCKASGYTFTSYHIQWVRQAPGQRLEWIGWIYPGDGSTQYNEKFKGRVTITRDTSASTAYMELSSLRSEDTAVYYCAREGTYYAMDYWGQGTLVTVSS

SEQ ID NO: 73 - protein, 112 aa, Artificial Sequence; identical to SEQ ID NO: 57
  synthetic

SEQ ID NO: 74 - protein, 118 aa, Artificial Sequence
  synthetic
QVQLVQSGAEVKKPGASVKVSCKASGYTFTSYHIQWVRQAPGQRLEWMGWIYPGDGSTQYNEKFKGRTTITRDTSASTAYMELSSLRSEDTAVYYCAREGTYYAMDYWGQGTLVTVSS

SEQ ID NO: 75 - protein, 112 aa, Artificial Sequence; identical to SEQ ID NO: 57
  synthetic

SEQ ID NO: 76 - protein, 118 aa, Artificial Sequence
  synthetic
QVQLVQSGAEVKKPGASVKVSCKASGYTFTSYHIQWVRQAPGQRLEWMGWIYPGDGSTQYNEKFKGRVTLTRDTSASTAYMELSSLRSEDTAVYYCAREGTYYAMDYWGQGTLVTVSS

SEQ ID NO: 77 - protein, 112 aa, Artificial Sequence; identical to SEQ ID NO: 57
  synthetic

SEQ ID NO: 78 - protein, 118 aa, Artificial Sequence
  synthetic
QVQLVQSGAEVKKPGASVKVSCKASGYTFTSYHIQWVRQAPGQRLEWMGWIYPGDGSTQYNEKFKGRVTITADTSASTAYMELSSLRSEDTAVYYCAREGTYYAMDYWGQGTLVTVSS

SEQ ID NO: 79 - protein, 112 aa, Artificial Sequence; identical to SEQ ID NO: 57
  synthetic

SEQ ID NO: 80 - protein, 118 aa, Artificial Sequence
  synthtetic
QVQLVQSGAEVKKPGASVKVSCKASGYTFTSYHIQWVRQAPGQRLEWMGWIYPGDGSTQYNEKFKGRVTITRDKSASTAYMELSSLRSEDTAVYYCAREGTYYAMDYWGQGTLVTVSS

SEQ ID NO: 81 - protein, 15 aa, Artificial Sequence
  synthetic
GGGGSGGGGSGGGGS

SEQ ID NO: 82 - protein, 18 aa, Artificial Sequence
  synthetic
GSTSGSGKPGSGEGSTKG

SEQ ID NO: 83 - protein, 19 aa, Artificial Sequence
  synthetic
DFQWREKTPEPPVPCVPEQ

SEQ ID NO: 84 - protein, 45 aa, Artificial Sequence
  synthetic
TTTPAPRPPTPAPTIASQPLSLRPEACRPAAGGAVHTRGLDFACD

SEQ ID NO: 85 - protein, 39 aa, Artificial Sequence
  synthetic
IEVMYPPPYLDNEKSNGTIIHVKGKHLCPSPLFPGPSKP

SEQ ID NO: 86 - protein, 26 aa, Artificial Sequence
  synthetic
TERRAEVPTAHPSPSPRPAGQFQTLV

SEQ ID NO: 87 - protein, 240 aa, Artificial Sequence
  synthetic
VSKKPSLSVQPGPIVAPEETLTLQCGSDAGYNRFVLYKDGERDFLQLAGAQPQAGLSQANFTLGPVSRSYGGQYRCYGAHNLSSEWSAPSDPLDILIAGQFYDRVSLSVQPGPTVASGENVTLLCQSQGWMQTFLLTKEGAADDPWRLRSTYQSQKYQAEFPMGPVTSAHAGTYRCYGSQSSKPYLLTHPSDPLELVVSGPSGGPSSPTTGPTSTSGPEDQPLTPTGSDPQSGLGRHLGV

SEQ ID NO: 88 - protein, 149 aa, Artificial Sequence
  synthetic
PLDILIAGQFYDRVSLSVQPGPTVASGENVTLLCQSQGWMQTFLLTKEGAADDPWRLRSTYQSQKYQAEFPMGPVTSAHAGTYRCYGSQSSKPYLLTHPSDPLELVVSGPSGGPSSPTTGPTSTSGPEDQPLTPTGSDPQSGLGRHLGV

SEQ ID NO: 89 - protein, 52 aa, Artificial Sequence
  synthetic
HPSDPLELVVSGPSGGPSSPTTGPTSTSGPEDQPLTPTGSDPQSGLGRHLGV

SEQ ID NO: 90 - protein, 36 aa, Artificial Sequence
  synthetic
PSSPTTGPTSTSGPEDQPLTPTGSDPQSGLGRHLGV

SEQ ID NO: 91 - protein, 30 aa, Artificial Sequence
  synthetic
GPTSTSGPEDQPLTPTGSDPQSGLGRHLGV

SEQ ID NO: 92 - protein, 8 aa, Artificial Sequence
  synthetic
GLGRHLGV

SEQ ID NO: 93 - protein, 31 aa, Artificial Sequence
  synthetic
LNVTYVPQNPTTGIFPGDGSGKQETRAGVVH

SEQ ID NO: 94 - protein, 40 aa, Artificial Sequence
  synthetic
PYEWSKSSDPLLVSVTGNPSNSWPSPTEPSSKTGNPRHLH

SEQ ID NO: 95 - protein, 24 aa, Artificial Sequence
  synthetic
IYIWAPLAGTCGVLLLSLVITLYC

SEQ ID NO: 96 - protein, 27 aa, Artificial Sequence
  synthetic
FWVLVVVGGVLACYSLLVTVAFIIFWV

SEQ ID NO: 97 - protein, 21 aa, Artificial Sequence
  synthetic
VGVVGGLLGSLVLLVWVLAVI

SEQ ID NO: 98 - protein, 21 aa, Artificial Sequence
  synthetic
VIGILVAVILLLLLLLLLFLI

SEQ ID NO: 99 - protein, 23 aa, Artificial Sequence
  synthetic
GAIGGAGVTALLALCLCLIFFIV

SEQ ID NO: 100 - protein, 19 aa, Artificial Sequence
  synthetic
ILIGTSVVIILFILLFFLL

SEQ ID NO: 101 - protein, 97 aa, Artificial Sequence
  synthetic
CSRAARGTIGARRTGQPLKEDPSAVPVFSVDYGELDFQWREKTPEPPVPCVPEQTEYATIVFPSGMGTSSPARRGSADGPRSAQPLRPEDGHCSWPL

SEQ ID NO: 102 - protein, 84 aa, Artificial Sequence
  synthetic
HRWCSNKKNAAVMDQESAGNRTANSEDSDEQDPQEVTYTQLNHCVFTQRKITRPSQRPKTPPTDIIVYTELPNAESRSKVVSCP

SEQ ID NO: 103 - protein, 84 aa, Artificial Sequence
  synthetic
HRWCSNKKNAAVMDQESAGNRTANSEDSDEQDPQEVTYTQLNHCVFTQRKITRPSQRPKTPPTDIIVYAELPNAESRSKVVSCP

SEQ ID NO: 104 - protein, 76 aa, Artificial Sequence
  synthetic
HRWCCNKKNAVVMDQEPAGNRTVNREDSDEQDPQEVTYAQLNHCVFTQRKITRPSQRPKTPPTDIIVYTELPNAEP

SEQ ID NO: 105 - protein, 114 aa, Artificial Sequence
  synthetic
RWCSKKKDAAVMNQEPAGHRTVNREDSDEQDPQEVTYAQLDHCIFTQRKITGPSQRSKRPSTDTSVCIELPNAEPRALSPAHEHHSQALMGSSRETTALSQTQLASSNVPAAGI

SEQ ID NO: 106 - protein, 116 aa, Artificial Sequence
  synthetic
LHCCCSNKKNAAVMDQEPAGDRTVNREDSDDQDPQEVTYAQLDHCVFTQTKITSPSQRPKTPPTDTTMYMELPNAKPRSLSPAHKHHSQALRGSSRETTALSQNRVASSHVPAAGI

SEQ ID NO: 107 - protein, 84 aa, Artificial Sequence
  synthetic
HLWCSNKKNAAVMDQEPAGNRTANSEDSDEQDPEEVTYAQLDHCVFTQRKITRPSQRPKTPPTDTILYTELPNAKPRSKVVSCP

SEQ ID NO: 108 - protein, 95 aa, Artificial Sequence
  synthetic
YRWCSNKKNAAVMDQEPAGDRTVNRQDSDEQDPQEVTYAQLDHCVFIQRKISRPSQRPKTPLTDTSVYTELPNAEPRSKVVSCPRAPQSGLEGVF

SEQ ID NO: 109 - protein, 67 aa, Artificial Sequence
  synthetic
HRWCANKKNAVVMDQEPAGNRTVNREDSDEQDPQEVTYAQLNHCVFTQRKITRPSQRPKTPPTDTSV

SEQ ID NO: 110 - protein, 101 aa, Artificial Sequence
  synthetic
HRQNQIKQGPPRSKDEEQKPQQRPDLAVDVLERTADKATVNGLPEKDRETDTSALAAGSSQEVTYAQLDHWALTQRTARAVSPQSTKPMAESITYAAVARH

SEQ ID NO: 111 - protein, 141 aa, Artificial Sequence
  synthetic
KLQRRWKRTQSQQGLQENSSGQSFFVRNKKVRRAPLSEGPHSLGCYNPMMEDGISYTTLRFPEMNIPRTGDAESSEMQRPPPDCDDTVTYSALHKRQVGDYENVIPDFPEDEGIHYSELIQFGVGERPQAQENVDYVILKH

SEQ ID NO: 112 - protein, 82 aa, Artificial Sequence
  synthetic
KTHRRKAARTAVGRNDTHPTTGSASPKHQKKSKLHGPTETSSCSGAAPTVEMDEELHYASLNFHGMNPSKDTSTEYSEVRTQ

SEQ ID NO: 113 - protein, 89 aa, Artificial Sequence
  synthetic
KARRKQAAGRPEKMDDEDPIMGTITSGSRKKPWPDSPGDQASPPGDAPPLEEQKELHYASLSFSEMKSREPKDQEAPSTTEYSEIKTSK

SEQ ID NO: 114 - protein, 85 aa, Artificial Sequence
  synthetic
RVKTRRKKAAQPVQNTDDVNPVMVSGSRGHQHQFQTGIVSDHPAEAGPISEDEQELHYAVLHFHKVQPQEPKVTDTEYSEIKIHK

SEQ ID NO: 115 - protein, 91 aa, Artificial Sequence
  synthetic
RSCRKKSARPAADVGDIGMKDANTIRGSASQGNLTESWADDNPRHHGLAAHSSGEEREIQYAPLSFHKGEPQDLSGQEATNNEYSEIKIPK

SEQ ID NO: 116 - protein, 115 aa, Artificial Sequence
  synthetic
RSCRKKSARPAAGVGDTGMEDAKAIRGSASQGPLTESWKDGNPLKKPPPAVAPSSGEEGELHYATLSFHKVKPQDPQGQEATDSEYSEIKIHKRETAETQACLRNHNPSSKEVRG

SEQ ID NO: 117 - protein, 94 aa, Artificial Sequence
  synthetic
VRSCRKKSARPAAGVGDTGIEDANAVRGSASQGPLTEPWAEDSPPDQPPPASARSSVGEGELQYASLSFQMVKPWDSRGQEATDTEYSEIKIHR

SEQ ID NO: 118 - protein, 126 aa, Artificial Sequence
  synthetic
KILPKRRTQTETPRPRFSRHSTILDYINVVPTAGPLAQKRNQKATPNSPRTPLPPGAPSPESKKNQKKQYQLPSFPEPKSSTQAPESQESQEELHYATLNFPGVRPRPEARMPKGTQADYAEVKFQ

SEQ ID NO: 119 - protein, 114 aa, Artificial Sequence
  synthetic
KICRKEARKRAAAEQDVPSTLGPISQGHQHECSAGSSQDHPPPGAATYTPGKGEEQELHYASLSFQGLRLWEPADQEAPSTTEYSEIKIHTGQPLRGPGFGLQLEREMSGMVPK

SEQ ID NO: 120 - protein, 93 aa, Artificial Sequence
  synthetic
RSCRKKSARPAVGVGDTGMEDANAVRGSASQGPLIESPADDSPPHHAPPALATPSPEEGEIQYASLSFHKARPQYPQEQEAIGYEYSEINIPK

SEQ ID NO: 121 - protein, 118 aa, Artificial Sequence
  synthetic
KCYFLRKAKAKQMPVEMSRPAVPLLNSNNEKMSDPNMEANSHYGHNDDVRNHAMKPINDNKEPLNSDVQYTEVQVSSAESHKDLGKKDTETVYSEVRKAVPDAVESRYSRTEGSLDGT

SEQ ID NO: 122 - protein, 61 aa, Artificial Sequence
  synthetic
KVNGCRKYKLNKTESTPVVEEDEMQPYASYTEKNNPLYDTTNKVKASEALQSEVDTDLHTL

SEQ ID NO: 123 - protein, 101 aa, Artificial Sequence
  synthetic
GLKRKIGRRSARDPLRSLPSPLPQEFTYLNSPTPGQLQPIYENVNVVSGDEVYSLAYYNQPEQESVAAETLGTHMEDKVSLDIYSRLRKANITDVDYEDAM

SEQ ID NO: 124 - protein, 86 aa, Artificial Sequence
  synthetic
HKISGESSATNEPRGASRPNPQEFTYSSPTPDMEELQPVYVNVGSVDVDVVYSQVWSMQQPESSANIRTLLENKDSQVIYSSVKKS

SEQ ID NO: 125 - protein, 140 aa, Artificial Sequence
  synthetic
HYARARRKPGGLSATGTSSHSPSECQEPSSSRPSRIDPQEPTHSKPLAPMELEPMYSNVNPGDSNPIYSQIWSIQHTKENSANCPMMHQEHEELTVLYSELKKTHPDDSAGEASSRGRAHEEDDEENYENVPRVLLASDH

SEQ ID NO: 126 - protein, 107 aa, Artificial Sequence
  synthetic
HCWRRRKSGVGFLGDETRLPPAPGPGESSHSICPAQVELQSLYVDVHPKKGDLVYSEIQTTQLGEEEEANTSRTLLEDKDVSVVYSEVKTQHPDNSAGKISSKDEES

SEQ ID NO: 127 - protein, 105 aa, Artificial Sequence
  synthetic
LSRKAGRKPASDPARSPSDSDSQEPTYHNVPAWEELQPVYTNANPRGENVVYSEVRIIQEKKKHAVASDPRHLRNKGSPIIYSEVKVASTPVSGSLFLASSAPHR

SEQ ID NO: 128 - protein, 77 aa, Artificial Sequence
  synthetic
QLRRRGKTNHYQTTVEKKSLTIYAQVQKPGPLQKKLDSFPAQDPCTTIYVAATEPVPESVQETNSITVYASVTLPES

SEQ ID NO: 129 - protein, 99 aa, Artificial Sequence
  synthetic
RLFKRRQGRIFPEGSCLNTFTKNPYAASKKTIYTYIMASRNTQPAESRIYDEILQSKVLPSKEEPVNTVYSEVQFADKMGKASTQDSKPPGTSSYEIVI

SEQ ID NO: 130 - protein, 111 aa, Artificial Sequence
  synthetic
RRHQGKQNELSDTAGREINLVDAHLKSEQTEASTRQNSQVLLSETGIYDNDPDLCFRMQEGSEVYSNPCLEENKPGIVYASLNHSVIGPNSRLARNVKEAPTEYASICVRS

SEQ ID NO: 131 - protein, 54 aa, Artificial Sequence
  synthetic
HLWRRQWRPRRFSALEQGIHPPQAQSKIEELEQEPEPEPEPEPEPEPEPEPEQL

SEQ ID NO: 132 - protein, 120 aa, Artificial Sequence
  synthetic
WRRKRKEKQSETSPKEFLTIYEDVKDLKTRRNHEQEQTFPGGGSTIYSMIQSQSSAPTSQEPAYTLYSLIQPSRKSGSRKRNHSPSFNSTIYEVIGKSQPKAQNPARLSRKELENFDVYS

SEQ ID NO: 133 - protein, 135 aa, Artificial Sequence
  synthetic
GCINITSSASQEGTRLNLICTVWHKKEEAEGFVVFLCKDRSGDCSPETSLKQLRLKRDPGIDGVGEISSQLMFTISQVTPLHSGTYQCCARSQKSGIRLQGHFFSILFTETGNYTVTGLKQRQHLEFSHNEGTLS

SEQ ID NO: 134 - protein, 74 aa, Artificial Sequence
  synthetic
HFGKTGRASDQRDLTEHKPSVSNHTQDHSNDPPNKMNEVTYSTLNFEAQQPTQPTSASPSLTATEIIYSEVKKQ

SEQ ID NO: 135 - protein, 78 aa, Artificial Sequence
  synthetic
FKWYSHSKEKIQNLSLISLANLPPSGLANAVAEGIRSEENIYTIEENVYEVEEPNEYYCYVSSRQQPSQPLGCRFAMP

SEQ ID NO: 136 - protein, 96 aa, Artificial Sequence
  synthetic
YKQRQAASNRRAQELVRMDSNIQGIENPGFEASPPAQGIPEAKVRHPLSYVAQRQPSESGRHLLSEPSTPLSPPGPGDVFFPSLDPVPDSPNFEVI

SEQ ID NO: 137 - protein, 82 aa, Artificial Sequence
  synthetic
LTRKKKALRIHSVEGDLRRKSAGQEEWSPSAPSPPGSCVQAEAAPAGLCGEQRGEDCAELHDYFNVLSYRSLGNCSFFTETG

SEQ ID NO: 138 - protein, 110 aa, Artificial Sequence
  synthetic
RIRQKKAQGSTSSTRLHEPEKNAREITQDTNDITYADLNLPKGKKPAPQAAEPNNHTEYASIQTSPQPASEDTLTYADLDMVHLNRTPKQPAPKPEPSFSEYASVQVPRK

SEQ ID NO: 139 - protein, 70 aa, Artificial Sequence
  synthetic
VVALIYCRKKRISALPGYPECREMGETLPEKPANPTNPDEADKVGAENTITYSLLMHPDALEEPDDQNRI

SEQ ID NO: 140 - protein, 93 aa, Artificial Sequence
  synthetic
KKLVKKFRQKKQRQWIGPTGMNQNMSFHRNHTATVRSHAENPTASHVDNEYSQPPRNSHLSAYPALEGALHRSSMQPDNSSDSDYDLHGAQRL

SEQ ID NO: 141 - protein, 98 aa, Artificial Sequence
  synthetic
RMFQKWIKAGDHSELSQNPKQAATQSELHYANLELLMWPLQEKPAPPREVEVEYSTVASPREELHYASVVFDSNTNRIAAQRPREEEPDSDYSVIRKT

SEQ ID NO: 142 - protein, 113 aa, Artificial Sequence
  synthetic
WRMMKYQQKAAGMSPEQVLQPLEGDLCYADLTLQLAGTSPQKATTKLSSAQVDQVEVEYVTMASLPKEDISYASLTLGAEDQEPTYCNMGHLSSHLPGRGPEEPTEYSTISRP

SEQ ID NO: 143 - protein, 168 aa, Artificial Sequence
  synthetic
LRHRRQGKHWTSTQRKADFQHPAGAVGPEPTDRGLQWRSSPAADAQEENLYAAVKHTQPEDGVEMDTRSPHDEDPQAVTYAEVKHSRPRREMASPPSPLSGEFLDTKDRQAEEDRQMDTEAAASEAPQDVTYAQLHSLTLRREATEPPPSQEGPSPAVPSIYATLAIH

SEQ ID NO: 144 - protein, 116 aa, Artificial Sequence
  synthetic
LRHRRQGKHWTSTQRKADFQHPAGAVGPEPTDRGLQWRSSPAADAQEENLYAAVKDTQPEDGVEMDTRAAASEAPQDVTYAQLHSLTLRRKATEPPPSQEREPPAEPSIYATLAIH

SEQ ID NO: 145 - protein, 167 aa, Artificial Sequence
  synthetic
RRQRHSKHRTSDQRKTDFQRPAGAAETEPKDRGLLRRSSPAADVQEENLYAAVKDTQSEDRVELDSQSPHDEDPQAVTYAPVKHSSPRREMASPPSSLSGEFLDTKDRQVEEDRQMDTEAAASEASQDVTYAQLHSLTLRRKATEPPPSQEGEPPAEPSIYATLAIH

SEQ ID NO: 146 - protein, 168 aa, Artificial Sequence
  synthetic
QHWRQGKHRTLAQRQADFQRPPGAAEPEPKDGGLQRRSSPAADVQGENFCAAVKNTQPEDGVEMDTRQSPHDEDPQAVTYAKVKHSRPRREMASPPSPLSGEFLDTKDRQAEEDRQMDTEAAASEAPQDVTYAQLHSFTLRQKATEPPPSQEGASPAEPSVYATLAIH

SEQ ID NO: 147 - protein, 111 aa, Artificial Sequence
  synthetic
RHRHQSKHRTSAHFYRPAGAAGPEPKDQGLQKRASPVADIQEEILNAAVKDTQPKDGVEMDARAAASEAPQDVTYAQLHSLTLRREATEPPPSQEREPPAEPSIYAPLAIH

SEQ ID NO: 148 - protein, 179 aa, Artificial Sequence
  synthetic
KRKGRCSVPAFCSSQAEAPADTPEPTAGHTLYSVLSQGYEKLDTPLRPARQQPTPTSDSSSDSNLTTEEDEDRPEVHKPISGRYEVFDQVTQEGAGHDPAPEGQADYDPVTPYVTEVESVVGENTMYAQVFNLQGKTPVSQKEESSATIYCSIRKPQVVPPPQQNDLEIPESPTYENFT

SEQ ID NO: 149 - protein, 204 aa, Artificial Sequence
  synthetic
CSRAARGTIGARRTGQPLKEDPSAVPVFSVDYGELDFQWREKTPEPPVPCVPEQTEYATIVFPSGMGTSSPARRGSADGPRSAQPLRPEDGHCSWPLGGGGSGGGGSCSRAARGTIGARRTGQPLKEDPSAVPVFSVDYGELDFQWREKTPEPPVPCVPEQTEYATIVFPSGMGTSSPARRGSADGPRSAQPLRPEDGHCSWPL

SEQ ID NO: 150 - protein, 147 aa, Artificial Sequence
  synthetic
CSRAARGTIGARRTGQPLKEDPSAVPVFSVDYGELDFQWREKTPEPPVPCVPEQTEYATIDFQWREKTPEPPVPCVPEQVDYGELDFQWREKTPEPPVPCVPEQTEYATIVFPSGMGTSSPARRGSADGPRSAQPLRPEDGHCSWPL

SEQ ID NO: 151 - protein, 134 aa, Artificial Sequence
  synthetic
LRRHKHRPAPRLQPSRTSPQAPRARAWAPSQASQAALHVPYATINTSCRPATLDTAHPHGGPSWWASLPTHAAHRPQGPAAWASTPIPARGSFVSVENGLYAQAGERPPHTGPGLTLFPDPRGPRAMEGPLGVR

SEQ ID NO: 152 - protein, 122 aa, Artificial Sequence
  synthetic
RIREFRQTFRKIIRSHVLRQQEPFKAAGTSARVLAAHGSDGEQVSLRLNGHPPGVWANGSAPHPERRPNGYALGLVSGGSAQESQGNTGLPDVELLSHELKGVCPEPPGLDDPLAQDGAGVS

SEQ ID NO: 153 - protein, 5 aa, Artificial Sequence
  synthetic
GGGGS

SEQ ID NO: 154 - protein, 15 aa, Artificial Sequence
  synthetic
GGGGSGGGGSGGGGS

SEQ ID NO: 155 - protein, 21 aa, Artificial Sequence
  synthetic
GSGEGRGSLLTCGDVEENPGP

SEQ ID NO: 156 - protein, 25 aa, Artificial Sequence
  synthetic
GSGVKQTLNFDLLKLAGDVESNPGP

SEQ ID NO: 157 - protein, 22 aa, Artificial Sequence
  synthetic
GSGATNFSLLKQAGDVEENPGP

SEQ ID NO: 158 - protein, 23 aa, Artificial Sequence
  synthetic
GSGQCTNYALLKLAGDVESNPGP

SEQ ID NO: 159 - DNA, 567 bp, Artificial Sequence
  synthetic
cccccccccctaacgttactggccgaagccgcttggaataaggccggtgtgcgtttgtctatatgttattttccaccatattgccgtcttttggcaatgtgagggcccggaaacctggccctgtcttcttgacgagcattcctaggggtctttcccctctcgccaaaggaatgcaaggtctgttgaatgtcgtgaaggaagcagttcctctggaagcttcttgaagacaaacaacgtctgtagcgaccctttgcaggcagcggaaccccccacctggcgacaggtgcctctgcggccaaaagccacgtgtataagatacacctgcaaaggcggcacaaccccagtgccacgttgtgagttggatagttgtggaaagagtcaaatggctctcctcaagcgtattcaacaaggggctgaaggatgcccagaaggtaccccattgtatgggatctgatctggggcctcggtgcacatgctttacatgtgtttagtcgaggttaaaaaaacgtctaggccccccgaaccacggggacgtggttttcctttgaaaaacacgatgataatatg

SEQ ID NO: 160 - DNA, 414 bp, Artificial Sequence
  synthetic
cccctctcgccaaaggaatgcaaggtctgttgaatgtcgtgaaggaagcagttcctctggaagcttcttgaagacaaacaacgtctgtagcgaccctttgcaggcagcggaaccccccacctggcgacaggtgcctctgcggccaaaagccacgtgtataagatacacctgcaaaggcggcacaaccccagtgccacgttgtgagttggatagttgtggaaagagtcaaatggctctcctcaagcgtattcaacaaggggctgaaggatgcccagaaggtaccccattgtatgggatctgatctggggcctcggtgcacatgctttacatgtgtttagtcgaggttaaaaaaacgtctaggccccccgaaccacggggacgtggttttcctttgaaaaacacgatgataatatg

SEQ ID NO: 161 - protein, 21 aa, Artificial Sequence
  synthetic
MALPVTALLLPLALLLHAARP

SEQ ID NO: 162 - protein, 22 aa, Artificial Sequence
  synthetic
MLLLVTSLLLCELPHPAFLLIP

SEQ ID NO: 163 - protein, 110 aa, Artificial Sequence
  synthetic
QSALTQPPSASGSPGQSVTISCTGTSSDVGGYKYVSWYQQHPGKAPKLMIYEVNKRPSGVPDRFSGSKSGNTASLTVSGLQAEDEADYYCSSYAGSNNWVFGGGTKLTVL

SEQ ID NO: 164 - protein, 119 aa, Artificial Sequence; identical to SEQ ID NO: 56
  synthetic

SEQ ID NO: 165 - protein, 113 aa, Artificial Sequence
  synthetic
DIVMTQSPDSLAVSLGERATISCKSSQSVLYSSNNKNYLAWYQQKPGQPPKLLIYWASTRESGVPDRFSGSGSGTDFTLTISSLQAEDVAVYYCQQYYGTPFTFGGGTKVEIK

SEQ ID NO: 166 - protein, 125 aa, Artificial Sequence
  synthetic
QVQLVQSGAEVKKPGASVKVSCKASGYTFTDYYLHWVRQAPGQGLEWMGWINPYTGGTNYAQKFQGRVTMTRDTSISTAYMELSGLTSDDTAVYYCARAGASYYDFWSGWVFDYWGQGTLVTVSS

SEQ ID NO: 167 - protein, 245 aa, Artificial Sequence
  synthetic
QVQLQQSGPELVKPGASVKMSCKASGYTFTSYHIQWVKQRPGQGLEWIGWIYPGDGSTQYNEKFKGKTTLTADKSSSTAYMLLSSLTSEDSAIYFCAREGTYYAMDYWGQGTSVTVSSGGGGSGGGGSGGGGSDVLMTQTPLSLPVSLGDQVSISCRSSQSIVHSNGNTYLEWYLQKPGQSPKLLIYKVSNRFSGVPDRFSGSGSGTDFTLKISRVEAEDLGVYYCFQGSHVPRTFGGGTKLEIK

SEQ ID NO: 168 - protein, 245 aa, Artificial Sequence
  synthetic
QVQLVQSGGGVVQPGGSLRVSCAASGVTLSDYGMHWVRQAPGKGLEWMAFIRNDGSDKYYADSVKGRFTISRDNSKKTVSLQMSSLRAEDTAVYYCAKNGESGPLDYWYFDLWGRGTLVTVSSGGGGSGGGGSGGGGSDIVMTQSPSFLSASVGDRVTITCRASHGINNYLAWYQQKPGKAPKLLIYAASTLQSGVPSRFSGSGSGTEFTLTISSLQPEDFATYYCQQYDSYPPTFGRGTKVEIK

SEQ ID NO: 169 - protein, 253 aa, Artificial Sequence
  synthetic
QVQLVQSGAEVKKPGASVKVSCKASGYTFTDYYLHWVRQAPGQGLEWMGWINPYTGGTNYAQKFQGRVTMTRDASISTVYMELSGLTSDDTAVHFCARAGASYYDFWSGWVFDYWGQGTLVTVSSGGGGSGGGGSGGGGSDIVMTQSPDSLAVSLGERATISCKSSQSVLYSSNNKNYLAWYQQKLGQPPKLLIYWASTRESGVPDRFSGSGSGTNFTLTISSLQAENVAVYYCQQYYGTPFTFGGGTKVEIK

SEQ ID NO: 170 - protein, 120 aa, Artificial Sequence [sequence omitted]

SEQ ID NO: 171 - protein, 107 aa, Artificial Sequence [sequence omitted]

SEQ ID NO: 172 - protein, 245 aa, Artificial Sequence
  synthetic
EVQLVESGGGLVQPGGSLRLSCAASGFNIKDTYIHWVRQAPGKGLEWVARIYPTNGYTRYADSVKGRFTISADTSKNTAYLQMNSLRAEDTAVYYCSRWGGDGFYAMDYWGQGTLVTVSSGSTSGSGKPGSGEGSTKGDIQMTQSPSSLSASVGDRVTITCRASQDVNTAVAWYQQKPGKAPKLLIYSASFLYSGVPSRFSGSRSGTDFTLTISSLQPEDFATYYCQQHYTTPPTFGQGTKVEIK

SEQ ID NO: 173 - protein, 119 aa, Artificial Sequence [sequence omitted]

SEQ ID NO: 174 - protein, 107 aa, Artificial Sequence [sequence omitted]

SEQ ID NO: 175 - protein, 244 aa, Artificial Sequence
  synthetic
DIQMTQSPSSLSASVGDRVTITCKASQDVSIGVAWYQQKPGKAPKLLIYSASYRYTGVPSRFSGSGSGTDFTLTISSLQPEDFATYYCQQYYIYPYTFGQGTKVEIKGSTSGSGKPGSGEGSTKGEVQLVESGGGLVQPGGSLRLSCAASGFTFTDYTMDWVRQAPGKGLEWVADVNPNSGGSIYNQRFKGRFTLSVDRSKNTLYLQMNSLRAEDTAVYYCARNLGPSFYFDYWGQGTLVTVSS

SEQ ID NO: 176 - protein, 119 aa, Artificial Sequence
  synthetic
QVQLQQSGPELKKPGETVKISCKASGYPFTNYGMNWVKQAPGQGLKWMGWINTSTGESTFADDFKGRFDFSLETSANTAYLQINNLKSEDMATYFCARWEVYHGYVPYWGQGTTVTVSS

SEQ ID NO: 177 - protein, 107 aa, Artificial Sequence
  synthetic
DIQLTQSHKFLSTSVGDRVSITCKASQDVYNAVAWYQQKPGQSPKLLIYSASSRYTGVPSRFTGSGSGPDFTFTISSVQAEDLAVYFCQQHFRTPFTFGSGTKLEIK

SEQ ID NO: 178 - protein, 120 aa, Artificial Sequence
  synthetic
EVQLQQSGPEVVKTGASVKISCKASGYSFTGYFINWVKKNSGKSPEWIGHISSSYATSTYNQKFKNKAAFTVDTSSSTAFMQLNSLTSEDSAVYYCVRSGNYEEYAMDYWGQGTSVTVSS

SEQ ID NO: 179 - protein, 113 aa, Artificial Sequence
  synthetic
DIVLTQTPSSLPVSVGEKVTMTCKSSQTLLYSNNQKNYLAWYQQKPGQSPKLLISWAFTRKSGVPDRFTGSGSGTDFTLTIGSVKAEDLAVYYCQQYSNYPWTFGGGTKLEIK

SEQ ID NO: 180 - protein, 121 aa, Artificial Sequence
  synthetic
QVQLVESGGGVVQPGRSLRLSCAASGFTFSSYGMHWVRQAPGKGLEWVAVIWYDGSNKYYADSVKGRFTISRDNSKNTLYLQMNSLRAEDTAVYYCAKEAPYYAKDYMDVWGKGTTVTVSS

SEQ ID NO: 181 - protein, 107 aa, Artificial Sequence
  synthetic
EIVLTQSPGTLSLSPGERATLSCRASQSVSSDYLAWYQQKPGQAPRLLIYGASSRATGIPDRFSGSGSGTDFTLTISRLEPEDFAVYYCQQYVSYWTFGGGTKVEIK

SEQ ID NO: 182 - protein, 121 aa, Artificial Sequence
  synthetic
QVQLVESGGGVVQPGRSLRLSCAASGFTFSSYGMHWVRQAPGKGLEWVAGIWWDGSNEKYADSVKGRFTISRDNSKNTLYLQMNSLRAEDTAVYYCAKEAPYYAKDYMDVWGKGTTVTVSS

SEQ ID NO: 183 - protein, 107 aa, Artificial Sequence
  synthetic
EIVLTQSPGTLSLSPGERATLSCRASQSVSSDYLAWYQQKPGQAPRLLIYGASRRATGIPDRFSGSGSGTDFTLTISRLEPEDFAVYYCQQYVSYWTFGGGTKVEIK

SEQ ID NO: 184 - protein, 117 aa, Artificial Sequence
  synthetic
EVQLVESGGGLVQPGGSLRLSCAASGFTFSSYSMNWVRQAPGKGLEWVSYISSSSSTIYYADSVKGRFTISRDNAKNSLYLQMNSLRAEDTAVYYCARGGHGYFDLWGRGTLVTVSS

SEQ ID NO: 185 - protein, 108 aa, Artificial Sequence
  synthetic
EIVLTQSPGTLSLSPGERATLSCRASQSVSSSYLAWYQQKPGQAPRLLIYGASSRATGIPDRFSGSGSGTDFTLTISRLEPEDFAVYYCQQYHHSPLTFGGGTKVEIK

SEQ ID NO: 186 - protein, 117 aa, Artificial Sequence
  synthetic
QVQLQQSGAELVRPGTSVKLSCKASDYTFTSYWMNWVKQRPGQGLEWIGMIDPSDSETQYNQMFKDKAALTVDKSSNTAYMQLSSLTSEDSAVYYCAKGGASGDWYFDVWGQGTTVT

SEQ ID NO: 187 - protein, 105 aa, Artificial Sequence
  synthetic
DIQLTQSPSSLSASLGGEVTITCKASQDIKKYIAWYQHKPGKSPRLLIHYTSVLQPGIPSRFSGSGSGRDYSFSIHNLEPEDIATYYCLHYDYLYTFGGGTKLEI

SEQ ID NO: 188 - protein, 270 aa, Artificial Sequence
  synthetic
MLLLVTSLLLCELPHPAFLLIPDYKDDDDKQVQLQQSGAELVRPGTSVKLSCKASDYTFTSYWMNWVKQRPGQGLEWIGMIDPSDSETQYNQMFKDKAALTVDKSSNTAYMQLSSLTSEDSAVYYCAKGGASGDWYFDVWGQGTTVTGSTSGSGKPGSGEGSTKGDIQLTQSPSSLSASLGGEVTITCKASQDIKKYIAWYQHKPGKSPRLLIHYTSVLQPGIPSRFSGSGSGRDYSFSIHNLEPEDIATYYCLHYDYLYTFGGGTKLEI

SEQ ID NO: 189 - protein, 118 aa, Artificial Sequence
  synthetic
QVQLKQSGPGLVQPSQSLSITCTVSGFSLTNYGVHWVRQSPGKGLEWLGVIWSGGNTDYNTPFTSRLSINKDNSKSQVFFKMNSLQSNDTAIYYCARALTYYDYEFAYWGQGTLVTVS

SEQ ID NO: 190 - protein, 107 aa, Artificial Sequence
  synthetic
DILLTQSPVILSVSPGERVSFSCRASQSIGTNIHWYQQRTNGSPRLLIKYASESISGIPSRFSGSGSGTDFTLSINSVESEDIADYYCQQNNNWPTTFGAGTKLELK

SEQ ID NO: 191 - protein, 243 aa, Artificial Sequence
  synthetic
QVQLKQSGPGLVQPSQSLSITCTVSGFSLTNYGVHWVRQSPGKGLEWLGVIWSGGNTDYNTPFTSRLSINKDNSKSQVFFKMNSLQSNDTAIYYCARALTYYDYEFAYWGQGTLVTVSGSTSGSGKPGSGEGSTKGDILLTQSPVILSVSPGERVSFSCRASQSIGTNIHWYQQRTNGSPRLLIKYASESISGIPSRFSGSGSGTDFTLSINSVESEDIADYYCQQNNNWPTTFGAGTKLELK

SEQ ID NO: 192 - protein, 119 aa, Artificial Sequence [sequence omitted]

SEQ ID NO: 193 - protein, 107 aa, Artificial Sequence [sequence omitted]

SEQ ID NO: 194 - protein, 244 aa, Artificial Sequence
  synthetic
DIQMTQSPSSLSASVGDRVTITCQASQDISNYLNWYQQKPGKAPKLLIYDASNLETGVPSRFSGSGSGTDFTFTISSLQPEDIATYFCQHFDHLPLAFGGGTKVEIKGSTSGSGKPGSGEGSTKGQVQLQESGPGLVKPSETLSLTCTVSGGSVSSGDYYWTWIRQSPGKGLEWIGHIYYSGNTNYNPSLKSRLTISIDTSKTQFSLKLSSVTAADTAIYYCVRDRVTGAFDIWGQGTMVTVSS

SEQ ID NO: 195 - protein, 120 aa, Artificial Sequence [sequence omitted]

SEQ ID NO: 196 - protein, 106 aa, Artificial Sequence [sequence omitted]

SEQ ID NO: 197 - protein, 123 aa, Artificial Sequence
  synthetic
QVQLQQSGAEVKKPGSSVKVSCKASGYTFTNYYIYWVRQAPGQGLEWIGGINPTSGGSNFNEKFKTRVTITVDESTNTAYMELSSLRSEDTAFYFCARQGLWFDSDGRGFDFWGQGSTVTVSS

SEQ ID NO: 198 - protein, 112 aa, Artificial Sequence [sequence omitted]

SEQ ID NO: 199 - protein, 121 aa, Artificial Sequence [sequence omitted]

SEQ ID NO: 200 - protein, 107 aa, Artificial Sequence [sequence omitted]

SEQ ID NO: 201 - protein, 120 aa, Artificial Sequence
  synthetic
QVNLLQSGAALVKPGASVKLSCKGSGFTFTDYKIHWVKQSHGKSLEWIGYFNPNSGYSTYNEKFKSKATLTADKSTDTAYMELTSLTSEDSATYYCTRLSPGGYYVMDAWGQGASVTVSS

SEQ ID NO: 202 - protein, 106 aa, Artificial Sequence
  synthetic
DIQMTQSPSFLSASVGDRVTINCKASQNINNYLNWYQQKLGEAPKRLIYNTNNLQTGIPSRFSGSGSGTDYTLTISSLQPEDFATYFCLQHNSFPTFGAGTKLELK

SEQ ID NO: 203 - protein, 266 aa, Artificial Sequence
  synthetic
MLLLVTSLLLCELPHPAFLLIPDIQMTQSPSFLSASVGDRVTINCKASQNINNYLNWYQQKLGEAPKRLIYNTNNLQTGIPSRFSGSGSGTDYTLTISSLQPEDFATYFCLQHNSFPTFGAGTKLELKGSTSGSGKPGSGEGSTKGQVNLLQSGAALVKPGASVKLSCKGSGFTFTDYKIHWVKQSHGKSLEWIGYFNPNSGYSTYNEKFKSKATLTADKSTDTAYMELTSLTSEDSATYYCTRLSPGGYYVMDAWGQGASVTVSS

SEQ ID NO: 204 - protein, 121 aa, Artificial Sequence [sequence omitted]

SEQ ID NO: 205 - protein, 106 aa, Artificial Sequence [sequence omitted]

SEQ ID NO: 206 - protein, 126 aa, Artificial Sequence
  synthetic
EVQLVQSGAEVKKPGSSVKVSCKASGGTFSSYAIGWVRQAPGQGLEWMGGIIPIFGIANYAQKFQGRVTITADESTSSAYMELSSLRSEDTAVYYCAREEGPYCSSTSCYAAFDIWGQGTLVTLSS

SEQ ID NO: 207 - protein, 108 aa, Artificial Sequence
  synthetic
QSVLTQDPAVSVALGQTVKITCQGDSLRSYFASWYQQKPGQAPTLVMYARNDRPAGVPDRFSGSKSGTSASLSAISGLQPEDEAYYCAAWDDSLNGYLFGAGTKLTVL

SEQ ID NO: 208 - protein, 125 aa, Artificial Sequence [sequence omitted]

SEQ ID NO: 209 - protein, 107 aa, Artificial Sequence [sequence omitted]

SEQ ID NO: 210 - protein, 121 aa, Artificial Sequence
  synthetic
QVQLVQSGAEVKKPGSSVKVSCKASGGTFSSYAISWVRQAPGQGLEWMGSIIPIFGTVNYAQKFQGRVTITADESTSTAYMELSSLRSEDTAVYYCARDPSVNLYWYFDLWGRGTLVTVSS

SEQ ID NO: 211 - protein, 107 aa, Artificial Sequence
  synthetic
DIQMTQSPSTLSASVGDRVTITCRASQSISSWWAWYQQKPGKAPKLLIYDASSLESGVPSRFSGSGSGTEFTLTISSLQPDDFATYYCQQYHAHPTTFGGGTKVEIK

SEQ ID NO: 212 - protein, 119 aa, Artificial Sequence
  synthetic
QVQLVQSGAEVKKPGSSVKVSCKASGGTFGSYAISWVRQAPGQGLEWMGSIIPIFGAANPAQKSQGRVTITADESTSTAYMELSSLRSEDTAVYYCAKMGRGKVAFDIWGQGTMVTVSS

SEQ ID NO: 213 - protein, 113 aa, Artificial Sequence
  synthetic
DIVMTQSPDSLAVSLGERATINCKSSQSVLYSPNNKNYLAWYQQKPGQPPKLLIYWASTRESGVPDRFSGSGSGTDFTLTISSLQAEDVAVYYCQQYYGSPITFGGGTKVEIK

SEQ ID NO: 214 - protein, 123 aa, Artificial Sequence
  synthetic
QVQLVQSGAEVKKPGASVKVSCKASGYAFTSYGINWVRQAPGQGLEWMGWISAYNGNTYYAQKLRGRVTMTTDTSTSTAYMELRSLRSDDTAVYYCARDLGGYGSGSVPFDPWGQGTLVTVSS

SEQ ID NO: 215 - protein, 108 aa, Artificial Sequence
  synthetic
EIVMTQSPATLSVSPGERATLSCRASQSVSSNLAWYQQKPGQAPRLLIYGASTRATGIPARFSGSGSGTEFTLTISSLQSEDFAVYYCQDYRTWPRRVFGGGTKVEIK

SEQ ID NO: 216 - protein, 129 aa, Artificial Sequence
  synthetic
QVQLQESGGGLVQAGGSLLLSCAASGRTFSSYAMGWFRQAPGKEREFVAAINWSGGSTSYADSVKGRFTISRDNTKNTVYLQMNSLKPEDTAAFYCAATYNPYSRDHYFPRMTTEYDYWGQGTQVTVSS

SEQ ID NO: 217 - protein, 119 aa, Artificial Sequence
  synthetic
QVQLVQSGAEVKKPGASVKVSCKASGYSFTGYTMNWVRQAPGQGLEWMGLITPYNGASSYNQKFRGKATMTVDTSTSTVYMELSSLRSEDTAVYYCARGGYDGRGFDYWGQGTLVTVSS

SEQ ID NO: 218 - protein, 106 aa, Artificial Sequence
  synthetic
DIQMTQSPSSLSASVGDRVTITCSASSSVSYMHWYQQKSGKAPKLLIYDTSKLASGVPSRFSGSGSGTDFTLTISSLQPEDFATYYCQQWSKHPLTFGQGTKLEIK

SEQ ID NO: 219 - protein, 123 aa, Artificial Sequence
  synthetic
QVQLQQSGPGLVTPSQTLSLTCAISGDSVSSNSATWNWIRQSPSRGLEWLGRTYYRSKWYNDYAVSVKSRMSINPDTSKNQFSLQLNSVTPEDTAVYYCARGMMTYYYGMDVWGQGTTVTVSS

SEQ ID NO: 220 - protein, 115 aa, Artificial Sequence
  synthetic
QPVLTQSSSLSASPGASASLTCTLRSGINVGPYRIYWYQQKPGSPPQYLLNYKSDSDKQQGSGVPSRFSGSKDASANAGVLLISGLRSEDEADYYCMIWHSSAAVFGGGTQLTVL

SEQ ID NO: 221 - protein, 278 aa, Artificial Sequence
  synthetic
MLLLVTSLLLCELPHPAFLLIPQPVLTQSSSLSASPGASASLTCTLRSGINVGPYRIYWYQQKPGSPPQYLLNYKSDSDKQQGSGVPSRFSGSKDASANAGVLLISGLRSEDEADYYCMIWHSSAAVFGGGTQLTVLGSTSGSGKPGSGEGSTKGQVQLQQSGPGLVTPSQTLSLTCAISGDSVSSNSATWNWIRQSPSRGLEWLGRTYYRSKWYNDYAVSVKSRMSINPDTSKNQFSLQLNSVTPEDTAVYYCARGMMTYYYGMDVWGQGTTVTVSS

SEQ ID NO: 222 - protein, 119 aa, Artificial Sequence
  synthetic
QVQLQQSGPELEKPGASVKISCKASGYSFTGYTMNWVKQSHGKSLEWIGLITPYNGASSYNQKFRGKATLTVDKSSSTAYMDLLSLTSEDSAVYFCARGGYDGRGFDYWGSGTPVTVSS

SEQ ID NO: 223 - protein, 106 aa, Artificial Sequence
  synthetic
DIELTQSPAIMSASPGEKVTMTCSASSSVSYMHWYQQKSGTSPKRWIYDTSKLASGVPGRFSGSGSGNSYSLTISSVEAEDDATYYCQQWSKHPLTFGSGTKVEIK

SEQ ID NO: 224 - protein, 259 aa, Artificial Sequence
  synthetic
MLLLVTSLLLCELPHPDIELTQSPAIMSASPGEKVTMTCSASSSVSYMHWYQQKSGTSPKRWIYDTSKLASGVPGRFSGSGSGNSYSLTISSVEAEDDATYYCQQWSKHPLTFGSGTKVEIKGSTSGSGKPGSGEGSTKGQVQLQQSGPELEKPGASVKISCKASGYSFTGYTMNWVKQSHGKSLEWIGLITPYNGASSYNQKFRGKATLTVDKSSSTAYMDLLSLTSEDSAVYFCARGGYDGRGFDYWGSGTPVTVSS

SEQ ID NO: 225 - protein, 114 aa, Artificial Sequence
  synthetic
QVQLVQSGGGLVQPGGSLRLSCAASDFDFAAYEMSWVRQSAPGQGLEWVAIISHDGIDKYYTDSVKGRFTISRDNSKNTLYLQMNTLRAEDTATYYCLRLGAVGQGTLVTVSSS

SEQ ID NO: 226 - protein, 120 aa, Artificial Sequence
  synthetic
QVQLVQSGGGLVQPGGSLRLSCAASDFAFDDYEMSWVRQAPGKALEWIGDINHSGTTIYNPSLKSRVTISRDNSKNTLYLQMNTLRAEDTAIYYCARPHYGDYSDAFDIWGQGTMVTVSS

SEQ ID NO: 227 - protein, 118 aa, Artificial Sequence
  synthetic
EVQLQQSGTVLARPGASVKMSCKASGYSFTNYRMNWVKQRPGQGLEWIGGIYPGNRDTTYNQKFKDKAKLTAVTSANTAYMELSSLTNEDSAVYYCTRGVIGIYFDYWGQGTTLTVSS

SEQ ID NO: 228 - protein, 111 aa, Artificial Sequence
  synthetic
DIVMTQSPASLAVSLGQRATISCKASQSVDYDGDSYMNWYQQKPGQPPKLLIYAASNLESGIPARFSGSGSGTDFTLNIHPVEEEDAATYYCQQNNEAPLTFGAGTKLELK

SEQ ID NO: 229 - protein, 269 aa, Artificial Sequence
  synthetic
MLLLVTSLLLCELPHPAFLLIPDIVMTQSPASLAVSLGQRATISCKASQSVDYDGDSYMNWYQQKPGQPPKLLIYAASNLESGIPARFSGSGSGTDFTLNIHPVEEEDAATYYCQQNNEAPLTFGAGTKLELKGSTSGSGKPGSGEGSTKGEVQLQQSGTVLARPGASVKMSCKASGYSFTNYRMNWVKQRPGQGLEWIGGIYPGNRDTTYNQKFKDKAKLTAVTSANTAYMELSSLTNEDSAVYYCTRGVIGIYFDYWGQGTTLTVSS

SEQ ID NO: 230 - protein, 118 aa, Artificial Sequence
  synthetic
QVQLQQSGTVLARPGASVKMSCKASGYSFTNYRMYWVKQRPGQGLEWIGAIYPGNSDTTYKQKFKGKAKLTAVTSASTAYMELSSLTNEDSAVYYCTRGIRGSYFDVWGAGTTVTVSS

SEQ ID NO: 231 - protein, 111 aa, Artificial Sequence
  synthetic
DIVMTQSPASLAVSLGQRATISCKASQSVDYDGDSYMNWYQQKPGQPPKLLIYAASNLESGIPARFSGSGSGTDFTLNIHPVEEEDAATYYCQQSNEDPYTFGGGTKLEIK

SEQ ID NO: 232 - protein, 269 aa, Artificial Sequence
  synthetic
MLLLVTSLLLCELPHPAFLLIPDIVMTQSPASLAVSLGQRATISCKASQSVDYDGDSYMNWYQQKPGQPPKLLIYAASNLESGIPARFSGSGSGTDFTLNIHPVEEEDAATYYCQQSNEDPYTFGGGTKLEIKGSTSGSGKPGSGEGSTKGQVQLQQSGTVLARPGASVKMSCKASGYSFTNYRMYWVKQRPGQGLEWIGAIYPGNSDTTYKQKFKGKAKLTAVTSASTAYMELSSLTNEDSAVYYCTRGIRGSYFDVWGAGTTVTVSS

SEQ ID NO: 233 - protein, 42 aa, Artificial Sequence
  synthetic
KRGRKKLLYIFKQPFMRPVQTTQEEDGCSCRFPEEEEGGCEL

SEQ ID NO: 234 - protein, 39 aa, Artificial Sequence
  synthetic
RSKRSRLLHSDYMNMTPRRPGPTRKHYQPYAPPRDFAAY

SEQ ID NO: 235 - protein, 112 aa, Artificial Sequence
  synthetic
RVKFSRSADAPAYQQGQNQLYNELNLGRREEYDVLDKRRGRDPEMGGKPRRKNPQEGLYNELQKDKMAEAYSEIGMKGERRRGKGHDGLYQGLSTATKDTYDALHMQALPPR

SEQ ID NO: 236 - protein, 112 aa, Artificial Sequence; identical to SEQ ID NO: 235
  synthetic

SEQ ID NO: 237 - protein, 112 aa, Artificial Sequence
  synthetic
RVKFSRSADAPAYQQGQNQLFNELNLGRREEYDVLDKRRGRDPEMGGKPRRKNPQEGLYNELQKDKMAEAFSEIGMKGERRRGKGHDGLFQGLSTATKDTYDALHMQALPPR

SEQ ID NO: 238 - protein, 112 aa, Artificial Sequence
  synthetic
RVKFSRSADAPAYQQGQNQLFNELNLGRREEFDVLDKRRGRDPEMGGKPRRKNPQEGLYNELQKDKMAEAFSEIGMKGERRRGKGHDGLFQGLSTATKDTYDALHMQALPPR

SEQ ID NO: 239 - protein, 112 aa, Artificial Sequence
  synthetic
RVKFSRSADAPAYQQGQNQLFNELNLGRREEFDVLDKRRGRDPEMGGKPRRKNPQEGLFNELQKDKMAEAYSEIGMKGERRRGKGHDGLYQGLSTATKDTFDALHMQALPPR

SEQ ID NO: 240 - DNA, 55 bp, Artificial Sequence
  synthetic
ggattacatcgccctgaaagttcaagagactttcagggcgatgtaatcctttttt

SEQ ID NO: 241 - DNA, 51 bp, Artificial Sequence
  synthetic
cacctgccatgtgcagcatgatttgtgtagtcatgctgcacatggcaggtg

SEQ ID NO: 242 - DNA, 47 bp, Artificial Sequence
  synthetic
gaatggagagagaattgaattcaagagattcaattctctctccattc

SEQ ID NO: 243 - protein, 72 aa, Artificial Sequence
  synthetic
CSRAARGTIGARRTGQPLKEDPSAVPVFSVDYGELVFPSGMGTSSPARRGSADGPRSAQPLRPEDGHCSWPL

SEQ ID NO: 244 - protein, 97 aa, Artificial Sequence
  synthetic
CSRAARGTIGARRTGQPLKEDPSAVPVFSVDYGELDFQWREKTPEPPVPCVPEQVDYGELVFPSGMGTSSPARRGSADGPRSAQPLRPEDGHCSWPL

SEQ ID NO: 245 - protein, 122 aa, Artificial Sequence
  synthetic
CSRAARGTIGARRTGQPLKEDPSAVPVFSVDYGELDFQWREKTPEPPVPCVPEQVDYGELDFQWREKTPEPPVPCVPEQVDYGELVFPSGMGTSSPARRGSADGPRSAQPLRPEDGHCSWPL

SEQ ID NO: 246 - protein, 147 aa, Artificial Sequence
  synthetic
CSRAARGTIGARRTGQPLKEDPSAVPVFSVDYGELDFQWREKTPEPPVPCVPEQVDYGELDFQWREKTPEPPVPCVPEQVDYGELDFQWREKTPEPPVPCVPEQVDYGELVFPSGMGTSSPARRGSADGPRSAQPLRPEDGHCSWPL

SEQ ID NO: 247 - protein, 172 aa, Artificial Sequence
  synthetic
CSRAARGTIGARRTGQPLKEDPSAVPVFSVDYGELDFQWREKTPEPPVPCVPEQVDYGELDFQWREKTPEPPVPCVPEQVDYGELDFQWREKTPEPPVPCVPEQVDYGELDFQWREKTPEPPVPCVPEQVDYGELVFPSGMGTSSPARRGSADGPRSAQPLRPEDGHCSWPL

SEQ ID NO: 248 - protein, 72 aa, Artificial Sequence
  synthetic
CSRAARGTIGARRTGQPLKEDPSAVPVFSTEYATIVFPSGMGTSSPARRGSADGPRSAQPLRPEDGHCSWPL

SEQ ID NO: 249 - protein, 97 aa, Artificial Sequence
  synthetic
CSRAARGTIGARRTGQPLKEDPSAVPVFSTEYATIDFQWREKTPEPPVPCVPEQTEYATIVFPSGMGTSSPARRGSADGPRSAQPLRPEDGHCSWPL

SEQ ID NO: 250 - protein, 122 aa, Artificial Sequence
  synthetic
CSRAARGTIGARRTGQPLKEDPSAVPVFSTEYATIDFQWREKTPEPPVPCVPEQTEYATIDFQWREKTPEPPVPCVPEQTEYATIVFPSGMGTSSPARRGSADGPRSAQPLRPEDGHCSWPL

SEQ ID NO: 251 - protein, 147 aa, Artificial Sequence
  synthetic
CSRAARGTIGARRTGQPLKEDPSAVPVFSTEYATIDFQWREKTPEPPVPCVPEQTEYATIDFQWREKTPEPPVPCVPEQTEYATIDFQWREKTPEPPVPCVPEQTEYATIVFPSGMGTSSPARRGSADGPRSAQPLRPEDGHCSWPL

SEQ ID NO: 252 - protein, 172 aa, Artificial Sequence
  synthetic
CSRAARGTIGARRTGQPLKEDPSAVPVFSTEYATIDFQWREKTPEPPVPCVPEQTEYATIDFQWREKTPEPPVPCVPEQTEYATIDFQWREKTPEPPVPCVPEQTEYATIDFQWREKTPEPPVPCVPEQTEYATIVFPSGMGTSSPARRGSADGPRSAQPLRPEDGHCSWPL

SEQ ID NO: 253 - protein, 204 aa, Artificial Sequence; identical to SEQ ID NO: 149
  synthetic

SEQ ID NO: 254 - protein, 147 aa, Artificial Sequence; identical to SEQ ID NO: 150
  synthetic

SEQ ID NO: 255 - protein, 480 aa, Artificial Sequence
  synthetic
MALPVTALLLPLALLLHAARPQSALTQPPSASGSPGQSVTISCTGTSSDVGGYKYVSWYQHHPDKAPKLMIYEVNKRPSGVPDRFSGSKSDNTASLTVSGLQAEDEADYYCSSYAGSNNWVFGGGTKLTVLGGGGSGGGGSGGGGSQVQLVESGGGVVQPGGSLRLSCAASGFTFSTYGMHWVRQAPGKGLEWVASISYDGSNKYYADSGQGRFTISRDTSKNSLYLQMNSLRAEDTAVYYCAIGIYGAYSFDYWGQGTLVTVSSTERRAEVPTAHPSPSPRPAGQFQTLVVGVVGGLLGSLVLLVWVLAVILRHRRQGKHWTSTQRKADFQHPAGAVGPEPTDRGLQWRSSPAADAQEENLYAAVKHTQPEDGVEMDTRSPHDEDPQAVTYAEVKHSRPRREMASPPSPLSGEFLDTKDRQAEEDRQMDTEAAASEAPQDVTYAQLHSLTLRREATEPPPSQEGPSPAVPSIYATLAIH

SEQ ID NO: 256 - protein, 480 aa, Artificial Sequence
  synthetic
MALPVTALLLPLALLLHAARPQSALTQPPSASGSPGQSVTISCTGTSSDVGGYKYVSWYQQHPGKAPKLMIYEVNKRPSGVPDRFSGSKSGNTASLTVSGLQAEDEADYYCSSYAGSNNWVFGGGTKLTVLGGGGSGGGGSGGGGSQVQLVESGGGVVQPGGSLRLSCAASGFTFSTYGMHWVRQAPGKGLEWVASISYDGSNKYYADSGQGRFTISRDTSKNSLYLQMNSLRAEDTAVYYCAIGIYGAYSFDYWGQGTLVTVSSTERRAEVPTAHPSPSPRPAGQFQTLVVGVVGGLLGSLVLLVWVLAVILRHRRQGKHWTSTQRKADFQHPAGAVGPEPTDRGLQWRSSPAADAQEENLYAAVKHTQPEDGVEMDTRSPHDEDPQAVTYAEVKHSRPRREMASPPSPLSGEFLDTKDRQAEEDRQMDTEAAASEAPQDVTYAQLHSLTLRREATEPPPSQEGPSPAVPSIYATLAIH

SEQ ID NO: 257 - protein, 489 aa, Artificial Sequence
  synthetic
MALPVTALLLPLALLLHAARPDIVMTQSPDSLAVSLGERATISCKSSQSVLYSSNNKNYLAWYQQKLGQPPKLLIYWASTRESGVPDRFSGSGSGTNFTLTISSLQAENVAVYYCQQYYGTPFTFGGGTKVEIKGGGGSGGGGSGGGGSQVQLVQSGAEVKKPGASVKVSCKASGYTFTDYYLHWVRQAPGQGLEWMGWINPYTGGTNYAQKFQGRVTMTRDASISTVYMELSGLTSDDTAVHFCARAGASYYDFWSGWVFDYWGQGTLVTVSSTERRAEVPTAHPSPSPRPAGQFQTLVVGVVGGLLGSLVLLVWVLAVILRHRRQGKHWTSTQRKADFQHPAGAVGPEPTDRGLQWRSSPAADAQEENLYAAVKHTQPEDGVEMDTRSPHDEDPQAVTYAEVKHSRPRREMASPPSPLSGEFLDTKDRQAEEDRQMDTEAAASEAPQDVTYAQLHSLTLRREATEPPPSQEGPSPAVPSIYATLAIH

SEQ ID NO: 258 - protein, 493 aa, Artificial Sequence
  synthetic
MALPVTALLLPLALLLHAARPDIVMTQSPDSLAVSLGERATISCKSSQSVLYSSNNKNYLAWYQQKPGQPPKLLIYWASTRESGVPDRFSGSGSGTDFTLTISSLQAEDVAVYYCQQYYGTPFTFGGGTKVEIKGGGGSGGGGSGGGGSQVQLVQSGAEVKKPGASVKVSCKASGYTFTDYYLHWVRQAPGQGLEWMGWINPYTGGTNYAQKFQGRVTMTRDTSISTAYMELSGLTSDDTAVYYCARAGASYYDFWSGWVFDYWGQGTLVTVSSGPTSTSGPEDQPLTPTGSDPQSGLGRHLGVVIGILVAVILLLLLLLLLFLILRHRRQGKHWTSTQRKADFQHPAGAVGPEPTDRGLQWRSSPAADAQEENLYAAVKHTQPEDGVEMDTRSPHDEDPQAVTYAEVKHSRPRREMASPPSPLSGEFLDTKDRQAEEDRQMDTEAAASEAPQDVTYAQLHSLTLRREATEPPPSQEGPSPAVPSIYATLAIH

SEQ ID NO: 259 - protein, 507 aa, Artificial Sequence
  synthetic
MALPVTALLLPLALLLHAARPQVQLVQSGAEVKKPGSSVKVSCKASGYTFTSYHIQWVRQAPGQGLEWMGWIYPGDGSTQYNEKFKGRTTITADKSTSTAYMELSSLRSEDTAVYYCAREGTYYAMDYWGQGTLVTVSSGGGGSGGGGSGGGGSDVVMTQTPLSLSVTPGQPASISCRSSQSIVHSNGNTYLEWYLQKPGQSPQLLIYKVSNRFSGVPDRFSGSGSGTDFTLKISRVEAEDVGVYYCFQGSHVPRTFGGGTKVEIKHPSDPLELVVSGPSGGPSSPTTGPTSTSGPEDQPLTPTGSDPQSGLGRHLGVVIGILVAVILLLLLLLLLFLILRHRRQGKHWTSTQRKADFQHPAGAVGPEPTDRGLQWRSSPAADAQEENLYAAVKHTQPEDGVEMDTRSPHDEDPQAVTYAEVKHSRPRREMASPPSPLSGEFLDTKDRQAEEDRQMDTEAAASEAPQDVTYAQLHSLTLRREATEPPPSQEGPSPAVPSIYATLAIH

SEQ ID NO: 260 - protein, 507 aa, Artificial Sequence
  sythetic
MALPVTALLLPLALLLHAARPQVQLVQSGAEVKKPGASVKVSCKASGYTFTSYHIQWVRQAPGQRLEWIGWIYPGDGSTQYNEKFKGRVTITRDTSASTAYMELSSLRSEDTAVYYCAREGTYYAMDYWGQGTLVTVSSGGGGSGGGGSGGGGSDVVMTQTPLSLSVTPGQPASISCRSSQSIVHSNGNTYLEWYLQKPGQSPQLLIYKVSNRFSGVPDRFSGSGSGTDFTLKISRVEAEDVGVYYCFQGSHVPRTFGGGTKVEIKHPSDPLELVVSGPSGGPSSPTTGPTSTSGPEDQPLTPTGSDPQSGLGRHLGVVIGILVAVILLLLLLLLLFLILRHRRQGKHWTSTQRKADFQHPAGAVGPEPTDRGLQWRSSPAADAQEENLYAAVKHTQPEDGVEMDTRSPHDEDPQAVTYAEVKHSRPRREMASPPSPLSGEFLDTKDRQAEEDRQMDTEAAASEAPQDVTYAQLHSLTLRREATEPPPSQEGPSPAVPSIYATLAIH

SEQ ID NO: 261 - protein, 395 aa, Artificial Sequence
  synthetic
MALPVTALLLPLALLLHAARPEQKLISEEDLQVQLQQSGPELVKPGASVKMSCKASGYTFTSYHIQWVKQRPGQGLEWIGWIYPGDGSTQYNEKFKGKTTLTADKSSSTAYMLLSSLTSEDSAIYFCAREGTYYAMDYWGQGTSVTVSSGGGGSGGGGSGGGGSDVLMTQTPLSLPVSLGDQVSISCRSSQSIVHSNGNTYLEWYLQKPGQSPKLLIYKVSNRFSGVPDRFSGSGSGTDFTLKISRVEAEDLGVYYCFQGSHVPRTFGGGTKLEIKTERRAEVPTAHPSPSPRPAGQFQTLVVGVVGGLLGSLVLLVWVLAVICSRAARGTIGARRTGQPLKEDPSAVPVFSVDYGELVFPSGMGTSSPARRGSADGPRSAQPLRPEDGHCSWPL

SEQ ID NO: 262 - protein, 420 aa, Artificial Sequence
  synthetic
MALPVTALLLPLALLLHAARPEQKLISEEDLQVQLQQSGPELVKPGASVKMSCKASGYTFTSYHIQWVKQRPGQGLEWIGWIYPGDGSTQYNEKFKGKTTLTADKSSSTAYMLLSSLTSEDSAIYFCAREGTYYAMDYWGQGTSVTVSSGGGGSGGGGSGGGGSDVLMTQTPLSLPVSLGDQVSISCRSSQSIVHSNGNTYLEWYLQKPGQSPKLLIYKVSNRFSGVPDRFSGSGSGTDFTLKISRVEAEDLGVYYCFQGSHVPRTFGGGTKLEIKTERRAEVPTAHPSPSPRPAGQFQTLVVGVVGGLLGSLVLLVWVLAVICSRAARGTIGARRTGQPLKEDPSAVPVFSVDYGELDFQWREKTPEPPVPCVPEQVDYGELVFPSGMGTSSPARRGSADGPRSAQPLRPEDGHCSWPL

SEQ ID NO: 263 - protein, 445 aa, Artificial Sequence
  synthetic
MALPVTALLLPLALLLHAARPEQKLISEEDLQVQLQQSGPELVKPGASVKMSCKASGYTFTSYHIQWVKQRPGQGLEWIGWIYPGDGSTQYNEKFKGKTTLTADKSSSTAYMLLSSLTSEDSAIYFCAREGTYYAMDYWGQGTSVTVSSGGGGSGGGGSGGGGSDVLMTQTPLSLPVSLGDQVSISCRSSQSIVHSNGNTYLEWYLQKPGQSPKLLIYKVSNRFSGVPDRFSGSGSGTDFTLKISRVEAEDLGVYYCFQGSHVPRTFGGGTKLEIKTERRAEVPTAHPSPSPRPAGQFQTLVVGVVGGLLGSLVLLVWVLAVICSRAARGTIGARRTGQPLKEDPSAVPVFSVDYGELDFQWREKTPEPPVPCVPEQVDYGELDFQWREKTPEPPVPCVPEQVDYGELVFPSGMGTSSPARRGSADGPRSAQPLRPEDGHCSWPL

SEQ ID NO: 264 - protein, 470 aa, Artificial Sequence
  synthetic
MALPVTALLLPLALLLHAARPEQKLISEEDLQVQLQQSGPELVKPGASVKMSCKASGYTFTSYHIQWVKQRPGQGLEWIGWIYPGDGSTQYNEKFKGKTTLTADKSSSTAYMLLSSLTSEDSAIYFCAREGTYYAMDYWGQGTSVTVSSGGGGSGGGGSGGGGSDVLMTQTPLSLPVSLGDQVSISCRSSQSIVHSNGNTYLEWYLQKPGQSPKLLIYKVSNRFSGVPDRFSGSGSGTDFTLKISRVEAEDLGVYYCFQGSHVPRTFGGGTKLEIKTERRAEVPTAHPSPSPRPAGQFQTLVVGVVGGLLGSLVLLVWVLAVICSRAARGTIGARRTGQPLKEDPSAVPVFSVDYGELDFQWREKTPEPPVPCVPEQVDYGELDFQWREKTPEPPVPCVPEQVDYGELDFQWREKTPEPPVPCVPEQVDYGELVFPSGMGTSSPARRGSADGPRSAQPLRPEDGHCSWPL

SEQ ID NO: 265 - protein, 495 aa, Artificial Sequence
  synthetic
MALPVTALLLPLALLLHAARPEQKLISEEDLQVQLQQSGPELVKPGASVKMSCKASGYTFTSYHIQWVKQRPGQGLEWIGWIYPGDGSTQYNEKFKGKTTLTADKSSSTAYMLLSSLTSEDSAIYFCAREGTYYAMDYWGQGTSVTVSSGGGGSGGGGSGGGGSDVLMTQTPLSLPVSLGDQVSISCRSSQSIVHSNGNTYLEWYLQKPGQSPKLLIYKVSNRFSGVPDRFSGSGSGTDFTLKISRVEAEDLGVYYCFQGSHVPRTFGGGTKLEIKTERRAEVPTAHPSPSPRPAGQFQTLVVGVVGGLLGSLVLLVWVLAVICSRAARGTIGARRTGQPLKEDPSAVPVFSVDYGELDFQWREKTPEPPVPCVPEQVDYGELDFQWREKTPEPPVPCVPEQVDYGELDFQWREKTPEPPVPCVPEQVDYGELDFQWREKTPEPPVPCVPEQVDYGELVFPSGMGTSSPARRGSADGPRSAQPLRPEDGHCSWPL

SEQ ID NO: 266 - protein, 395 aa, Artificial Sequence
  synthetic
MALPVTALLLPLALLLHAARPEQKLISEEDLQVQLQQSGPELVKPGASVKMSCKASGYTFTSYHIQWVKQRPGQGLEWIGWIYPGDGSTQYNEKFKGKTTLTADKSSSTAYMLLSSLTSEDSAIYFCAREGTYYAMDYWGQGTSVTVSSGGGGSGGGGSGGGGSDVLMTQTPLSLPVSLGDQVSISCRSSQSIVHSNGNTYLEWYLQKPGQSPKLLIYKVSNRFSGVPDRFSGSGSGTDFTLKISRVEAEDLGVYYCFQGSHVPRTFGGGTKLEIKTERRAEVPTAHPSPSPRPAGQFQTLVVGVVGGLLGSLVLLVWVLAVICSRAARGTIGARRTGQPLKEDPSAVPVFSTEYATIVFPSGMGTSSPARRGSADGPRSAQPLRPEDGHCSWPL

SEQ ID NO: 267 - protein, 420 aa, Artificial Sequence
  synthetic
MALPVTALLLPLALLLHAARPEQKLISEEDLQVQLQQSGPELVKPGASVKMSCKASGYTFTSYHIQWVKQRPGQGLEWIGWIYPGDGSTQYNEKFKGKTTLTADKSSSTAYMLLSSLTSEDSAIYFCAREGTYYAMDYWGQGTSVTVSSGGGGSGGGGSGGGGSDVLMTQTPLSLPVSLGDQVSISCRSSQSIVHSNGNTYLEWYLQKPGQSPKLLIYKVSNRFSGVPDRFSGSGSGTDFTLKISRVEAEDLGVYYCFQGSHVPRTFGGGTKLEIKTERRAEVPTAHPSPSPRPAGQFQTLVVGVVGGLLGSLVLLVWVLAVICSRAARGTIGARRTGQPLKEDPSAVPVFSTEYATIDFQWREKTPEPPVPCVPEQTEYATIVFPSGMGTSSPARRGSADGPRSAQPLRPEDGHCSWPL

SEQ ID NO: 268 - protein, 445 aa, Artificial Sequence
  synthetic
MALPVTALLLPLALLLHAARPEQKLISEEDLQVQLQQSGPELVKPGASVKMSCKASGYTFTSYHIQWVKQRPGQGLEWIGWIYPGDGSTQYNEKFKGKTTLTADKSSSTAYMLLSSLTSEDSAIYFCAREGTYYAMDYWGQGTSVTVSSGGGGSGGGGSGGGGSDVLMTQTPLSLPVSLGDQVSISCRSSQSIVHSNGNTYLEWYLQKPGQSPKLLIYKVSNRFSGVPDRFSGSGSGTDFTLKISRVEAEDLGVYYCFQGSHVPRTFGGGTKLEIKTERRAEVPTAHPSPSPRPAGQFQTLVVGVVGGLLGSLVLLVWVLAVICSRAARGTIGARRTGQPLKEDPSAVPVFSTEYATIDFQWREKTPEPPVPCVPEQTEYATIDFQWREKTPEPPVPCVPEQTEYATIVFPSGMGTSSPARRGSADGPRSAQPLRPEDGHCSWPL

SEQ ID NO: 269 - protein, 470 aa, Artificial Sequence
  synthetic
MALPVTALLLPLALLLHAARPEQKLISEEDLQVQLQQSGPELVKPGASVKMSCKASGYTFTSYHIQWVKQRPGQGLEWIGWIYPGDGSTQYNEKFKGKTTLTADKSSSTAYMLLSSLTSEDSAIYFCAREGTYYAMDYWGQGTSVTVSSGGGGSGGGGSGGGGSDVLMTQTPLSLPVSLGDQVSISCRSSQSIVHSNGNTYLEWYLQKPGQSPKLLIYKVSNRFSGVPDRFSGSGSGTDFTLKISRVEAEDLGVYYCFQGSHVPRTFGGGTKLEIKTERRAEVPTAHPSPSPRPAGQFQTLVVGVVGGLLGSLVLLVWVLAVICSRAARGTIGARRTGQPLKEDPSAVPVFSTEYATIDFQWREKTPEPPVPCVPEQTEYATIDFQWREKTPEPPVPCVPEQTEYATIDFQWREKTPEPPVPCVPEQTEYATIVFPSGMGTSSPARRGSADGPRSAQPLRPEDGHCSWPL

SEQ ID NO: 270 - protein, 495 aa, Artificial Sequence
  synthetic
MALPVTALLLPLALLLHAARPEQKLISEEDLQVQLQQSGPELVKPGASVKMSCKASGYTFTSYHIQWVKQRPGQGLEWIGWIYPGDGSTQYNEKFKGKTTLTADKSSSTAYMLLSSLTSEDSAIYFCAREGTYYAMDYWGQGTSVTVSSGGGGSGGGGSGGGGSDVLMTQTPLSLPVSLGDQVSISCRSSQSIVHSNGNTYLEWYLQKPGQSPKLLIYKVSNRFSGVPDRFSGSGSGTDFTLKISRVEAEDLGVYYCFQGSHVPRTFGGGTKLEIKTERRAEVPTAHPSPSPRPAGQFQTLVVGVVGGLLGSLVLLVWVLAVICSRAARGTIGARRTGQPLKEDPSAVPVFSTEYATIDFQWREKTPEPPVPCVPEQTEYATIDFQWREKTPEPPVPCVPEQTEYATIDFQWREKTPEPPVPCVPEQTEYATIDFQWREKTPEPPVPCVPEQTEYATIVFPSGMGTSSPARRGSADGPRSAQPLRPEDGHCSWPL

SEQ ID NO: 271 - protein, 527 aa, Artificial Sequence
  synthetic
MALPVTALLLPLALLLHAARPEQKLISEEDLQVQLQQSGPELVKPGASVKMSCKASGYTFTSYHIQWVKQRPGQGLEWIGWIYPGDGSTQYNEKFKGKTTLTADKSSSTAYMLLSSLTSEDSAIYFCAREGTYYAMDYWGQGTSVTVSSGGGGSGGGGSGGGGSDVLMTQTPLSLPVSLGDQVSISCRSSQSIVHSNGNTYLEWYLQKPGQSPKLLIYKVSNRFSGVPDRFSGSGSGTDFTLKISRVEAEDLGVYYCFQGSHVPRTFGGGTKLEIKTERRAEVPTAHPSPSPRPAGQFQTLVVGVVGGLLGSLVLLVWVLAVICSRAARGTIGARRTGQPLKEDPSAVPVFSVDYGELDFQWREKTPEPPVPCVPEQTEYATIVFPSGMGTSSPARRGSADGPRSAQPLRPEDGHCSWPLGGGGSGGGGSCSRAARGTIGARRTGQPLKEDPSAVPVFSVDYGELDFQWREKTPEPPVPCVPEQTEYATIVFPSGMGTSSPARRGSADGPRSAQPLRPEDGHCSWPL

SEQ ID NO: 272 - protein, 470 aa, Artificial Sequence
  synthetic
MALPVTALLLPLALLLHAARPEQKLISEEDLQVQLQQSGPELVKPGASVKMSCKASGYTFTSYHIQWVKQRPGQGLEWIGWIYPGDGSTQYNEKFKGKTTLTADKSSSTAYMLLSSLTSEDSAIYFCAREGTYYAMDYWGQGTSVTVSSGGGGSGGGGSGGGGSDVLMTQTPLSLPVSLGDQVSISCRSSQSIVHSNGNTYLEWYLQKPGQSPKLLIYKVSNRFSGVPDRFSGSGSGTDFTLKISRVEAEDLGVYYCFQGSHVPRTFGGGTKLEIKTERRAEVPTAHPSPSPRPAGQFQTLVVGVVGGLLGSLVLLVWVLAVICSRAARGTIGARRTGQPLKEDPSAVPVFSVDYGELDFQWREKTPEPPVPCVPEQTEYATIDFQWREKTPEPPVPCVPEQVDYGELDFQWREKTPEPPVPCVPEQTEYATIVFPSGMGTSSPARRGSADGPRSAQPLRPEDGHCSWPL

SEQ ID NO: 273 - protein, 244 aa, Artificial Sequence
  synthetic
QVQLVESGGGVVQPGGSLRLSCAASGFTFSTYGMHWVRQAPGKGLEWVASISYDGSNKYYADSGQGRFTISRDTSKNSLYLQMNSLRAEDTAVYYCAIGIYGAYSFDYWGQGTLVTVSSGGGGSGGGGSGGGGSQSALTQPPSASGSPGQSVTISCTGTSSDVGGYKYVSWYQHHPDKAPKLMIYEVNKRPSGVPDRFSGSKSDNTASLTVSGLQAEDEADYYCSSYAGSNNWVFGGGTKLTVL

SEQ ID NO: 274 - protein, 244 aa, Artificial Sequence
  synthetic
QVQLVESGGGVVQPGGSLRLSCAASGFTFSTYGMHWVRQAPGKGLEWVASISYDGSNKYYADSGQGRFTISRDTSKNSLYLQMNSLRAEDTAVYYCAIGIYGAYSFDYWGQGTLVTVSSGGGGSGGGGSGGGGSQSALTQPPSASGSPGQSVTISCTGTSSDVGGYKYVSWYQQHPGKAPKLMIYEVNKRPSGVPDRFSGSKSGNTASLTVSGLQAEDEADYYCSSYAGSNNWVFGGGTKLTVL

SEQ ID NO: 275 - DNA, 3069 bp, Artificial Sequence
  synthetic
atggcgctgccagtcactgcattgttattgcctctggccctgcttctccatgcggcaaggccacaggtgcaactggttcaatctggtgctgaggtgaaaaagcccggcgcatccgtgaaagtgagctgtaaggcatcagggtacaccttcaccagctatcacatacaatgggtccgccaggcccccggacagaggttggaatggattgggtggatttacccgggtgacggctcaacccagtacaatgagaagttcaagggcagggtgactatcacacgcgatacctccgcgagcacagcttacatggagttatctagcctgagatccgaagatacggcggtgtattactgcgcgcgggaagggacctactatgccatggactattggggacaagggaccctggttaccgtgagttctgggggcgggggttccgggggagggggatctgggggtggagggagcgatgtggtaatgacccagacacctttgtctttgagtgtcacccccggacagccggcaagtatatcctgtagatcatcccaatcaatcgtgcactccaacggaaacacatacttggaatggtatctccagaaacctggacagtccccacagttgctcatctacaaagtgtcaaatcgcttttcaggcgtgcccgatcgtttcagcggctcaggctccgggacagactttacattgaagattagccgcgtagaggcagaggatgtgggcgtttactattgttttcaagggtcacacgtgccacgcacattcggcggcggtaccaaggtggaaattaagcaccccagcgacccgctggagctcgttgtgtccggaccatcagggggcccgagtagccctacaaccggccccacttctaccagtggaccggaagatcaaccacttacaccaacgggcagcgacccccagtcaggcctagggcgccacctgggtgtggtcatcgggatactggtcgctgtcatcctgcttctgctccttctcttgctcctattcctaatcctgcgccacaggagacagggcaagcactggaccagcacccagcggaaggccgactttcagcaccctgccggcgccgtgggccctgagcctaccgacaggggcctgcagtggaggagctccccagccgccgatgcccaggaggagaatctgtacgccgccgtgaagcacacccagccagaggacggcgtggagatggacacccgctccccacacgacgaggacccacaggccgtgacctacgccgaggtgaagcacagccgccccagacgcgagatggccagcccacccagccccctgtccggcgagttcctggacaccaaggacaggcaggccgaggaggaccggcagatggacaccgaggccgccgcctccgaggccccccaggacgtgacctacgcccagctgcactccctgaccctgcggagagaggccaccgagcccccacccagccaggagggcccctcccccgccgtgcctagcatctacgccaccctggccatccaccggagaaagcgtggatccggggaaggccgaggctcccttctaacatgtggagatgtcgaggaaaaccctggccctatggcgctgccagtcactgcattgttattgcctctggccctgcttctccatgcggcgcgcccagacatccagatgacccaatccccaagcagtctctcagccagcgtgggagacagggttacaatcacgtgccgcgccagccaggacgtcaacaccgctgtggcttggtatcagcaaaagcccgggaaggcaccaaagctgcttatttatagcgcctccttcttgtattctggagtgccatccaggttttccgggtcacgtagcgggactgactttaccctcaccatatccagcctccagcccgaggatttcgccacctattactgtcagcaacactacacgactccaccgacttttggacagggcactaaagtggagattaagggcagcacgagtgggagtggaaagcccggcagcggggaggggtctaccaagggagaggtccagctggttgaatccggaggcgggcttgtgcaacctggaggctccctgaggcttagttgtgccgcgtcaggattcaacattaaggatacctatattcattgggtccgacaagccccgggcaagggcttggagtgggtggccagaatctatccgaccaacggatatacaaggtacgccgattctgtgaaaggacgcttcaccatcagcgcggacacatccaaaaacacagcctatctgcagatgaactcccttcgcgccgaggatacagccgtgtactattgtagtcggtggggaggcgacggcttctacgcgatggactattggggacaaggaacactggtgactgtcagtagcactacgaccccagcacctagacctcccaccccagctccaactatagcttcccagccattgtctctccggccagaggcgtgtcgaccagccgctggaggggccgttcatacaagaggactcgatttcgcttgcgatatctacatatgggcccctcttgccgggacatgcggtgtcctgcttctaagcttggttattaccctctattgcaaaagaggacgaaagaaactgctttatatattcaagcaacctttcatgcgccccgtacagaccacgcaggaggaagatgggtgtagctgtcgcttccctgaggaagaggaaggtggatgcgagttgcgggtgaagttcagtcgatccgccgatgcgcctgcctatcagcaagggcagaaccagctttataacgagttaaaccttggccgccgggaagagtatgacgtgttggacaagcgtcgcgggagagaccctgagatgggcggaaaaccaaggagaaaaaatccacaggaaggcttatataacgagttgcagaaagacaagatggccgaggcatactccgaaatcggaatgaagggcgagcgacggcgcggcaaaggccacgatggactctatcagggcttaagcaccgccaccaaagacacctacgatgcacttcatatgcaggcactcccacctagatgataa

SEQ ID NO: 276 - protein, 1021 aa, Artificial Sequence
  synthetic
MALPVTALLLPLALLLHAARPQVQLVQSGAEVKKPGASVKVSCKASGYTFTSYHIQWVRQAPGQRLEWIGWIYPGDGSTQYNEKFKGRVTITRDTSASTAYMELSSLRSEDTAVYYCAREGTYYAMDYWGQGTLVTVSSGGGGSGGGGSGGGGSDVVMTQTPLSLSVTPGQPASISCRSSQSIVHSNGNTYLEWYLQKPGQSPQLLIYKVSNRFSGVPDRFSGSGSGTDFTLKISRVEAEDVGVYYCFQGSHVPRTFGGGTKVEIKHPSDPLELVVSGPSGGPSSPTTGPTSTSGPEDQPLTPTGSDPQSGLGRHLGVVIGILVAVILLLLLLLLLFLILRHRRQGKHWTSTQRKADFQHPAGAVGPEPTDRGLQWRSSPAADAQEENLYAAVKHTQPEDGVEMDTRSPHDEDPQAVTYAEVKHSRPRREMASPPSPLSGEFLDTKDRQAEEDRQMDTEAAASEAPQDVTYAQLHSLTLRREATEPPPSQEGPSPAVPSIYATLAIHRRKRGSGEGRGSLLTCGDVEENPGPMALPVTALLLPLALLLHAARPDIQMTQSPSSLSASVGDRVTITCRASQDVNTAVAWYQQKPGKAPKLLIYSASFLYSGVPSRFSGSRSGTDFTLTISSLQPEDFATYYCQQHYTTPPTFGQGTKVEIKGSTSGSGKPGSGEGSTKGEVQLVESGGGLVQPGGSLRLSCAASGFNIKDTYIHWVRQAPGKGLEWVARIYPTNGYTRYADSVKGRFTISADTSKNTAYLQMNSLRAEDTAVYYCSRWGGDGFYAMDYWGQGTLVTVSSTTTPAPRPPTPAPTIASQPLSLRPEACRPAAGGAVHTRGLDFACDIYIWAPLAGTCGVLLLSLVITLYCKRGRKKLLYIFKQPFMRPVQTTQEEDGCSCRFPEEEEGGCELRVKFSRSADAPAYQQGQNQLYNELNLGRREEYDVLDKRRGRDPEMGGKPRRKNPQEGLYNELQKDKMAEAYSEIGMKGERRRGKGHDGLYQGLSTATKDTYDALHMQALPPR

SEQ ID NO: 277 - DNA, 3567 bp, Artificial Sequence
  synthetic
atggcgctgccagtcactgcattgttattgcctctggccctgcttctccatgcggcaaggccacaggtgcaactggttcaatctggtgctgaggtgaaaaagcccggcagctctgtgaaagtgagctgtaaggcatcagggtataccttcaccagctatcacatacaatgggtccgccaggcccccggacagggattggaatggatggggtggatttacccgggtgacggctcaacccagtacaatgagaagttcaagggcaggacaactatcacagccgataagtccacgagcacagcttacatggagttatctagcctgagatccgaagatacggcggtgtattactgcgcgcgggaagggacctactatgccatggactattggggacaagggaccctggttaccgtgagttctgggggcgggggttccgggggagggggatctgggggtggagggagcgatgtggtaatgacccagacacctttgtctttgagtgtcacccccggacagccggcaagtatatcctgtagatcatcccaatcaatcgtgcactccaacggaaacacatacttggaatggtatctccagaaacctggacagtccccacagttgctcatctacaaagtgtcaaatcgcttttcaggcgtgcccgatcgtttcagcggctcaggctccgggacagactttacattgaagattagccgcgtagaggcagaggatgtgggcgtttactattgttttcaagggtcacacgtgccacgcacattcggcggcggtaccaaggtggaaattaagcaccccagcgacccgctggagctcgttgtgtccggaccatcagggggcccgagtagccctacaaccggccccacttctaccagtggaccggaagatcaaccacttacaccaacgggcagcgacccccagtcaggcctagggcgccacctgggtgtggtcatcgggatactggtcgctgtcatcctgcttctgctccttctcttgctcctattcctaatcctgcgccacaggagacagggcaagcactggaccagcacccagcggaaggccgactttcagcaccctgccggcgccgtgggccctgagcctaccgacaggggcctgcagtggaggagctccccagccgccgatgcccaggaggagaatctgtacgccgccgtgaagcacacccagccagaggacggcgtggagatggacacccgctccccacacgacgaggacccacaggccgtgacctacgccgaggtgaagcacagccgccccagacgcgagatggccagcccacccagccccctgtccggcgagttcctggacaccaaggacaggcaggccgaggaggaccggcagatggacaccgaggccgccgcctccgaggccccccaggacgtgacctacgcccagctgcactccctgaccctgcggagagaggccaccgagcccccacccagccaggagggcccctcccccgccgtgcctagcatctacgccaccctggccatccactgataacccccccccctaacgttactggccgaagccgcttggaataaggccggtgtgcgtttgtctatatgttattttccaccatattgccgtcttttggcaatgtgagggcccggaaacctggccctgtcttcttgacgagcattcctaggggtctttcccctctcgccaaaggaatgcaaggtctgttgaatgtcgtgaaggaagcagttcctctggaagcttcttgaagacaaacaacgtctgtagcgaccctttgcaggcagcggaaccccccacctggcgacaggtgcctctgcggccaaaagccacgtgtataagatacacctgcaaaggcggcacaaccccagtgccacgttgtgagttggatagttgtggaaagagtcaaatggctctcctcaagcgtattcaacaaggggctgaaggatgcccagaaggtaccccattgtatgggatctgatctggggcctcggtgcacatgctttacatgtgtttagtcgaggttaaaaaaacgtctaggccccccgaaccacggggacgtggttttcctttgaaaaacacgatgataatatgatggcgctgccagtcactgcattgttattgcctctggccctgcttctccatgcggcgcgcccagacatccagatgacccaatccccaagcagtctctcagccagcgtgggagacagggttacaatcacgtgccgcgccagccaggacgtcaacaccgctgtggcttggtatcagcaaaagcccgggaaggcaccaaagctgcttatttatagcgcctccttcttgtattctggagtgccatccaggttttccgggtcacgtagcgggactgactttaccctcaccatatccagcctccagcccgaggatttcgccacctattactgtcagcaacactacacgactccaccgacttttggacagggcactaaagtggagattaagggcagcacgagtgggagtggaaagcccggcagcggggaggggtctaccaagggagaggtccagctggttgaatccggaggcgggcttgtgcaacctggaggctccctgaggcttagttgtgccgcgtcaggattcaacattaaggatacctatattcattgggtccgacaagccccgggcaagggcttggagtgggtggccagaatctatccgaccaacggatatacaaggtacgccgattctgtgaaaggacgcttcaccatcagcgcggacacatccaaaaacacagcctatctgcagatgaactcccttcgcgccgaggatacagccgtgtactattgtagtcggtggggaggcgacggcttctacgcgatggactattggggacaaggaacactggtgactgtcagtagcactacgaccccagcacctagacctcccaccccagctccaactatagcttcccagccattgtctctccggccagaggcgtgtcgaccagccgctggaggggccgttcatacaagaggactcgatttcgcttgcgatatctacatatgggcccctcttgccgggacatgcggtgtcctgcttctaagcttggttattaccctctattgcaaaagaggacgaaagaaactgctttatatattcaagcaacctttcatgcgccccgtacagaccacgcaggaggaagatgggtgtagctgtcgcttccctgaggaagaggaaggtggatgcgagttgcgggtgaagttcagtcgatccgccgatgcgcctgcctatcagcaagggcagaaccagctttataacgagttaaaccttggccgccgggaagagtatgacgtgttggacaagcgtcgcgggagagaccctgagatgggcggaaaaccaaggagaaaaaatccacaggaaggcttatataacgagttgcagaaagacaagatggccgaggcatactccgaaatcggaatgaagggcgagcgacggcgcggcaaaggccacgatggactctatcagggcttaagcaccgccaccaaagacacctacgatgcacttcatatgcaggcactcccacctagatgataa

SEQ ID NO: 278 - protein, 996 aa, Artificial Sequence
  synthetic
MALPVTALLLPLALLLHAARPQVQLVQSGAEVKKPGSSVKVSCKASGYTFTSYHIQWVRQAPGQGLEWMGWIYPGDGSTQYNEKFKGRTTITADKSTSTAYMELSSLRSEDTAVYYCAREGTYYAMDYWGQGTLVTVSSGGGGSGGGGSGGGGSDVVMTQTPLSLSVTPGQPASISCRSSQSIVHSNGNTYLEWYLQKPGQSPQLLIYKVSNRFSGVPDRFSGSGSGTDFTLKISRVEAEDVGVYYCFQGSHVPRTFGGGTKVEIKHPSDPLELVVSGPSGGPSSPTTGPTSTSGPEDQPLTPTGSDPQSGLGRHLGVVIGILVAVILLLLLLLLLFLILRHRRQGKHWTSTQRKADFQHPAGAVGPEPTDRGLQWRSSPAADAQEENLYAAVKHTQPEDGVEMDTRSPHDEDPQAVTYAEVKHSRPRREMASPPSPLSGEFLDTKDRQAEEDRQMDTEAAASEAPQDVTYAQLHSLTLRREATEPPPSQEGPSPAVPSIYATLAIHMALPVTALLLPLALLLHAARPDIQMTQSPSSLSASVGDRVTITCRASQDVNTAVAWYQQKPGKAPKLLIYSASFLYSGVPSRFSGSRSGTDFTLTISSLQPEDFATYYCQQHYTTPPTFGQGTKVEIKGSTSGSGKPGSGEGSTKGEVQLVESGGGLVQPGGSLRLSCAASGFNIKDTYIHWVRQAPGKGLEWVARIYPTNGYTRYADSVKGRFTISADTSKNTAYLQMNSLRAEDTAVYYCSRWGGDGFYAMDYWGQGTLVTVSSTTTPAPRPPTPAPTIASQPLSLRPEACRPAAGGAVHTRGLDFACDIYIWAPLAGTCGVLLLSLVITLYCKRGRKKLLYIFKQPFMRPVQTTQEEDGCSCRFPEEEEGGCELRVKFSRSADAPAYQQGQNQLYNELNLGRREEYDVLDKRRGRDPEMGGKPRRKNPQEGLYNELQKDKMAEAYSEIGMKGERRRGKGHDGLYQGLSTATKDTYDALHMQALPPR

SEQ ID NO: 279 - DNA, 3525 bp, Artificial Sequence
  synthetic
atggcgctgccagtcactgcattgttattgcctctggccctgcttctccatgcggcaaggccagatatagtgatgacacagtcccccgactccctggctgtctcactgggagaacgagcgacgattagttgtaagtctagccagagcgtcctgtattcaagcaataacaagaattacctcgcctggtatcagcaaaagccgggacagccacccaaactgttgatttactgggccagcacgagagagagcggagtgcccgaccgcttcagcggatccgggtcaggcacagattttaccctgactattagctcccttcaagcggaagatgtcgccgtctactattgccagcaatattacggaactccattcacattcggcggtgggaccaaagtagagataaagggtggcgggggatccggcggtggcggtagcgggggaggcgggtcccaagtgcaactagtccaatcaggtgccgaagtcaagaaaccaggtgcatccgtgaaagtgtcttgcaaagccagtggctacacttttactgactactatctgcactgggtgcgtcaagcacccggccaggggcttgaatggatgggctggattaacccttatactggagggacaaattacgctcagaagttccagggacgcgttacaatgacccgagacaccagcatcagcacagcgtacatggagttaagtgggctgacttccgacgataccgccgtgtattactgcgctcgggcaggggcctcttactatgatttttggtccggttgggtcttcgattactgggggcagggaaccctggtgacagtgtcctcaggccccacttctaccagtggaccggaagatcaaccacttacaccaacgggcagcgacccccagtcaggcctagggcgccacctgggtgtggtcatcgggatactggtcgctgtcatcctgcttctgctccttctcttgctcctattcctaatcctgcgccacaggagacagggcaagcactggaccagcacccagcggaaggccgactttcagcaccctgccggcgccgtgggccctgagcctaccgacaggggcctgcagtggaggagctccccagccgccgatgcccaggaggagaatctgtacgccgccgtgaagcacacccagccagaggacggcgtggagatggacacccgctccccacacgacgaggacccacaggccgtgacctacgccgaggtgaagcacagccgccccagacgcgagatggccagcccacccagccccctgtccggcgagttcctggacaccaaggacaggcaggccgaggaggaccggcagatggacaccgaggccgccgcctccgaggccccccaggacgtgacctacgcccagctgcactccctgaccctgcggagagaggccaccgagcccccacccagccaggagggcccctcccccgccgtgcctagcatctacgccaccctggccatccactgataacccccccccctaacgttactggccgaagccgcttggaataaggccggtgtgcgtttgtctatatgttattttccaccatattgccgtcttttggcaatgtgagggcccggaaacctggccctgtcttcttgacgagcattcctaggggtctttcccctctcgccaaaggaatgcaaggtctgttgaatgtcgtgaaggaagcagttcctctggaagcttcttgaagacaaacaacgtctgtagcgaccctttgcaggcagcggaaccccccacctggcgacaggtgcctctgcggccaaaagccacgtgtataagatacacctgcaaaggcggcacaaccccagtgccacgttgtgagttggatagttgtggaaagagtcaaatggctctcctcaagcgtattcaacaaggggctgaaggatgcccagaaggtaccccattgtatgggatctgatctggggcctcggtgcacatgctttacatgtgtttagtcgaggttaaaaaaacgtctaggccccccgaaccacggggacgtggttttcctttgaaaaacacgatgataatatgatggcgctgccagtcactgcattgttattgcctctggccctgcttctccatgcggcgcgcccagacatccagatgacccaatccccaagcagtctctcagccagcgtgggagacagggttacaatcacgtgccgcgccagccaggacgtcaacaccgctgtggcttggtatcagcaaaagcccgggaaggcaccaaagctgcttatttatagcgcctccttcttgtattctggagtgccatccaggttttccgggtcacgtagcgggactgactttaccctcaccatatccagcctccagcccgaggatttcgccacctattactgtcagcaacactacacgactccaccgacttttggacagggcactaaagtggagattaagggcagcacgagtgggagtggaaagcccggcagcggggaggggtctaccaagggagaggtccagctggttgaatccggaggcgggcttgtgcaacctggaggctccctgaggcttagttgtgccgcgtcaggattcaacattaaggatacctatattcattgggtccgacaagccccgggcaagggcttggagtgggtggccagaatctatccgaccaacggatatacaaggtacgccgattctgtgaaaggacgcttcaccatcagcgcggacacatccaaaaacacagcctatctgcagatgaactcccttcgcgccgaggatacagccgtgtactattgtagtcggtggggaggcgacggcttctacgcgatggactattggggacaaggaacactggtgactgtcagtagcactacgaccccagcacctagacctcccaccccagctccaactatagcttcccagccattgtctctccggccagaggcgtgtcgaccagccgctggaggggccgttcatacaagaggactcgatttcgcttgcgatatctacatatgggcccctcttgccgggacatgcggtgtcctgcttctaagcttggttattaccctctattgcaaaagaggacgaaagaaactgctttatatattcaagcaacctttcatgcgccccgtacagaccacgcaggaggaagatgggtgtagctgtcgcttccctgaggaagaggaaggtggatgcgagttgcgggtgaagttcagtcgatccgccgatgcgcctgcctatcagcaagggcagaaccagctttataacgagttaaaccttggccgccgggaagagtatgacgtgttggacaagcgtcgcgggagagaccctgagatgggcggaaaaccaaggagaaaaaatccacaggaaggcttatataacgagttgcagaaagacaagatggccgaggcatactccgaaatcggaatgaagggcgagcgacggcgcggcaaaggccacgatggactctatcagggcttaagcaccgccaccaaagacacctacgatgcacttcatatgcaggcactcccacctagatgataa

SEQ ID NO: 280 - protein, 982 aa, Artificial Sequence
  synthetic
MALPVTALLLPLALLLHAARPDIVMTQSPDSLAVSLGERATISCKSSQSVLYSSNNKNYLAWYQQKPGQPPKLLIYWASTRESGVPDRFSGSGSGTDFTLTISSLQAEDVAVYYCQQYYGTPFTFGGGTKVEIKGGGGSGGGGSGGGGSQVQLVQSGAEVKKPGASVKVSCKASGYTFTDYYLHWVRQAPGQGLEWMGWINPYTGGTNYAQKFQGRVTMTRDTSISTAYMELSGLTSDDTAVYYCARAGASYYDFWSGWVFDYWGQGTLVTVSSGPTSTSGPEDQPLTPTGSDPQSGLGRHLGVVIGILVAVILLLLLLLLLFLILRHRRQGKHWTSTQRKADFQHPAGAVGPEPTDRGLQWRSSPAADAQEENLYAAVKHTQPEDGVEMDTRSPHDEDPQAVTYAEVKHSRPRREMASPPSPLSGEFLDTKDRQAEEDRQMDTEAAASEAPQDVTYAQLHSLTLRREATEPPPSQEGPSPAVPSIYATLAIHMALPVTALLLPLALLLHAARPDIQMTQSPSSLSASVGDRVTITCRASQDVNTAVAWYQQKPGKAPKLLIYSASFLYSGVPSRFSGSRSGTDFTLTISSLQPEDFATYYCQQHYTTPPTFGQGTKVEIKGSTSGSGKPGSGEGSTKGEVQLVESGGGLVQPGGSLRLSCAASGFNIKDTYIHWVRQAPGKGLEWVARIYPTNGYTRYADSVKGRFTISADTSKNTAYLQMNSLRAEDTAVYYCSRWGGDGFYAMDYWGQGTLVTVSSTTTPAPRPPTPAPTIASQPLSLRPEACRPAAGGAVHTRGLDFACDIYIWAPLAGTCGVLLLSLVITLYCKRGRKKLLYIFKQPFMRPVQTTQEEDGCSCRFPEEEEGGCELRVKFSRSADAPAYQQGQNQLYNELNLGRREEYDVLDKRRGRDPEMGGKPRRKNPQEGLYNELQKDKMAEAYSEIGMKGERRRGKGHDGLYQGLSTATKDTYDALHMQALPPR

SEQ ID NO: 281 - DNA, 3513 bp, Artificial Sequence
  synthetic
atggcgctgccagtcactgcattgttattgcctctggccctgcttctccatgcggcaaggccagatatagtgatgacacagtcccccgactccctggctgtctcactgggagaacgagcgacgattagttgtaagtctagccagagcgtcctgtattcaagcaataacaagaattacctcgcctggtatcagcaaaagccgggacagccacccaaactgttgatttactgggccagcacgagagagagcggagtgcccgaccgcttcagcggatccgggtcaggcacagattttaccctgactattagctcccttcaagcggaagatgtcgccgtctactattgccagcaatattacggaactccattcacattcggcggtgggaccaaagtagagataaagggtggcgggggatccggcggtggcggtagcgggggaggcgggtcccaagtgcaactagtccaatcaggtgccgaagtcaagaaaccaggtgcatccgtgaaagtgtcttgcaaagccagtggctacacttttactgactactatctgcactgggtgcgtcaagcacccggccaggggcttgaatggatgggctggattaacccttatactggagggacaaattacgctcagaagttccagggacgcgttacaatgacccgagacaccagcatcagcacagcgtacatggagttaagtaggctgaggtccgaagataccgccgtgtattactgcgctcgggcaggggcctcttactatgatttttggtccggttgggtcttcgattactgggggcagggaaccctggtgacagtgtcctcaaccagtggaccggaagatcaaccacttacaccaacgggcagcgacccccagtcaggcctagggcgccacctgggtgtggtcatcgggatactggtcgctgtcatcctgcttctgctccttctcttgctcctattcctaatcctgcgccacaggagacagggcaagcactggaccagcacccagcggaaggccgactttcagcaccctgccggcgccgtgggccctgagcctaccgacaggggcctgcagtggaggagctccccagccgccgatgcccaggaggagaatctgtacgccgccgtgaagcacacccagccagaggacggcgtggagatggacacccgctccccacacgacgaggacccacaggccgtgacctacgccgaggtgaagcacagccgccccagacgcgagatggccagcccacccagccccctgtccggcgagttcctggacaccaaggacaggcaggccgaggaggaccggcagatggacaccgaggccgccgcctccgaggccccccaggacgtgacctacgcccagctgcactccctgaccctgcggagagaggccaccgagcccccacccagccaggagggcccctcccccgccgtgcctagcatctacgccaccctggccatccactgataacccccccccctaacgttactggccgaagccgcttggaataaggccggtgtgcgtttgtctatatgttattttccaccatattgccgtcttttggcaatgtgagggcccggaaacctggccctgtcttcttgacgagcattcctaggggtctttcccctctcgccaaaggaatgcaaggtctgttgaatgtcgtgaaggaagcagttcctctggaagcttcttgaagacaaacaacgtctgtagcgaccctttgcaggcagcggaaccccccacctggcgacaggtgcctctgcggccaaaagccacgtgtataagatacacctgcaaaggcggcacaaccccagtgccacgttgtgagttggatagttgtggaaagagtcaaatggctctcctcaagcgtattcaacaaggggctgaaggatgcccagaaggtaccccattgtatgggatctgatctggggcctcggtgcacatgctttacatgtgtttagtcgaggttaaaaaaacgtctaggccccccgaaccacggggacgtggttttcctttgaaaaacacgatgataatatgatggcgctgccagtcactgcattgttattgcctctggccctgcttctccatgcggcgcgcccagacatccagatgacccaatccccaagcagtctctcagccagcgtgggagacagggttacaatcacgtgccgcgccagccaggacgtcaacaccgctgtggcttggtatcagcaaaagcccgggaaggcaccaaagctgcttatttatagcgcctccttcttgtattctggagtgccatccaggttttccgggtcacgtagcgggactgactttaccctcaccatatccagcctccagcccgaggatttcgccacctattactgtcagcaacactacacgactccaccgacttttggacagggcactaaagtggagattaagggcagcacgagtgggagtggaaagcccggcagcggggaggggtctaccaagggagaggtccagctggttgaatccggaggcgggcttgtgcaacctggaggctccctgaggcttagttgtgccgcgtcaggattcaacattaaggatacctatattcattgggtccgacaagccccgggcaagggcttggagtgggtggccagaatctatccgaccaacggatatacaaggtacgccgattctgtgaaaggacgcttcaccatcagcgcggacacatccaaaaacacagcctatctgcagatgaactcccttcgcgccgaggatacagccgtgtactattgtagtcggtggggaggcgacggcttctacgcgatggactattggggacaaggaacactggtgactgtcagtagcactacgaccccagcacctagacctcccaccccagctccaactatagcttcccagccattgtctctccggccagaggcgtgtcgaccagccgctggaggggccgttcatacaagaggactcgatttcgcttgcgatatctacatatgggcccctcttgccgggacatgcggtgtcctgcttctaagcttggttattaccctctattgcaaaagaggacgaaagaaactgctttatatattcaagcaacctttcatgcgccccgtacagaccacgcaggaggaagatgggtgtagctgtcgcttccctgaggaagaggaaggtggatgcgagttgcgggtgaagttcagtcgatccgccgatgcgcctgcctatcagcaagggcagaaccagctttataacgagttaaaccttggccgccgggaagagtatgacgtgttggacaagcgtcgcgggagagaccctgagatgggcggaaaaccaaggagaaaaaatccacaggaaggcttatataacgagttgcagaaagacaagatggccgaggcatactccgaaatcggaatgaagggcgagcgacggcgcggcaaaggccacgatggactctatcagggcttaagcaccgccaccaaagacacctacgatgcacttcatatgcaggcactcccacctagatgataa

SEQ ID NO: 282 - protein, 978 aa, Artificial Sequence
  synthetic
MALPVTALLLPLALLLHAARPDIVMTQSPDSLAVSLGERATISCKSSQSVLYSSNNKNYLAWYQQKPGQPPKLLIYWASTRESGVPDRFSGSGSGTDFTLTISSLQAEDVAVYYCQQYYGTPFTFGGGTKVEIKGGGGSGGGGSGGGGSQVQLVQSGAEVKKPGASVKVSCKASGYTFTDYYLHWVRQAPGQGLEWMGWINPYTGGTNYAQKFQGRVTMTRDTSISTAYMELSRLRSEDTAVYYCARAGASYYDFWSGWVFDYWGQGTLVTVSSTSGPEDQPLTPTGSDPQSGLGRHLGVVIGILVAVILLLLLLLLLFLILRHRRQGKHWTSTQRKADFQHPAGAVGPEPTDRGLQWRSSPAADAQEENLYAAVKHTQPEDGVEMDTRSPHDEDPQAVTYAEVKHSRPRREMASPPSPLSGEFLDTKDRQAEEDRQMDTEAAASEAPQDVTYAQLHSLTLRREATEPPPSQEGPSPAVPSIYATLAIHMALPVTALLLPLALLLHAARPDIQMTQSPSSLSASVGDRVTITCRASQDVNTAVAWYQQKPGKAPKLLIYSASFLYSGVPSRFSGSRSGTDFTLTISSLQPEDFATYYCQQHYTTPPTFGQGTKVEIKGSTSGSGKPGSGEGSTKGEVQLVESGGGLVQPGGSLRLSCAASGFNIKDTYIHWVRQAPGKGLEWVARIYPTNGYTRYADSVKGRFTISADTSKNTAYLQMNSLRAEDTAVYYCSRWGGDGFYAMDYWGQGTLVTVSSTTTPAPRPPTPAPTIASQPLSLRPEACRPAAGGAVHTRGLDFACDIYIWAPLAGTCGVLLLSLVITLYCKRGRKKLLYIFKQPFMRPVQTTQEEDGCSCRFPEEEEGGCELRVKFSRSADAPAYQQGQNQLYNELNLGRREEYDVLDKRRGRDPEMGGKPRRKNPQEGLYNELQKDKMAEAYSEIGMKGERRRGKGHDGLYQGLSTATKDTYDALHMQALPPR

SEQ ID NO: 283 - protein, 113 aa, Artificial Sequence; identical to SEQ ID NO: 165
  synthetic

SEQ ID NO: 284 - protein, 125 aa, Artificial Sequence
  synthetic
QVQLVQSGAEVKKPGASVKVSCKASGYTFTDYYLHWVRQAPGQGLEWMGWINPYTGGTNYAQKFQGRVTMTRDTSISTAYMELSRLRSEDTAVYYCARAGASYYDFWSGWVFDYWGQGTLVTVSS

SEQ ID NO: 285 - protein, 253 aa, Artificial Sequence
  synthetic
DIVMTQSPDSLAVSLGERATISCKSSQSVLYSSNNKNYLAWYQQKPGQPPKLLIYWASTRESGVPDRFSGSGSGTDFTLTISSLQAEDVAVYYCQQYYGTPFTFGGGTKVEIKGGGGSGGGGSGGGGSQVQLVQSGAEVKKPGASVKVSCKASGYTFTDYYLHWVRQAPGQGLEWMGWINPYTGGTNYAQKFQGRVTMTRDTSISTAYMELSGLTSDDTAVYYCARAGASYYDFWSGWVFDYWGQGTLVTVSS

SEQ ID NO: 286 - protein, 253 aa, Artificial Sequence
  synthetic
DIVMTQSPDSLAVSLGERATISCKSSQSVLYSSNNKNYLAWYQQKPGQPPKLLIYWASTRESGVPDRFSGSGSGTDFTLTISSLQAEDVAVYYCQQYYGTPFTFGGGTKVEIKGGGGSGGGGSGGGGSQVQLVQSGAEVKKPGASVKVSCKASGYTFTDYYLHWVRQAPGQGLEWMGWINPYTGGTNYAQKFQGRVTMTRDTSISTAYMELSRLRSEDTAVYYCARAGASYYDFWSGWVFDYWGQGTLVTVSS

SEQ ID NO: 287 - protein, 245 aa, Artificial Sequence
  synthetic
QVQLVQSGAEVKKPGSSVKVSCKASGYTFTSYHIQWVRQAPGQGLEWMGWIYPGDGSTQYNEKFKGRTTITADKSTSTAYMELSSLRSEDTAVYYCAREGTYYAMDYWGQGTLVTVSSGGGGSGGGGSGGGGSDVVMTQTPLSLSVTPGQPASISCRSSQSIVHSNGNTYLEWYLQKPGQSPQLLIYKVSNRFSGVPDRFSGSGSGTDFTLKISRVEAEDVGVYYCFQGSHVPRTFGGGTKVEIK

SEQ ID NO: 288 - protein, 245 aa, Artificial Sequence
  synthetic
QVQLVQSGAEVKKPGASVKVSCKASGYTFTSYHIQWVRQAPGQRLEWIGWIYPGDGSTQYNEKFKGRVTITRDTSASTAYMELSSLRSEDTAVYYCAREGTYYAMDYWGQGTLVTVSSGGGGSGGGGSGGGGSDVVMTQTPLSLSVTPGQPASISCRSSQSIVHSNGNTYLEWYLQKPGQSPQLLIYKVSNRFSGVPDRFSGSGSGTDFTLKISRVEAEDVGVYYCFQGSHVPRTFGGGTKVEIK

SEQ ID NO: 289 - protein, 26 aa, Artificial Sequence
  syntheric
TSGPEDQPLTPTGSDPQSGLGRHLGV

SEQ ID NO: 290 - protein, 47 aa, Artificial Sequence
  synthetic
GAISLAPKAQIKESLRAELRVTERRAEVPTAHPSPSPRPAGQFQTLV

SEQ ID NO: 291 - protein, 42 aa, Artificial Sequence
  synthetic
APKAQIKESLRAELRVTERRAEVPTAHPSPSPRPAGQFQTLV

SEQ ID NO: 292 - protein, 36 aa, Artificial Sequence
  synthetic
KESLRAELRVTERRAEVPTAHPSPSPRPAGQFQTLV

SEQ ID NO: 293 - protein, 30 aa, Artificial Sequence
  synthetic
ELRVTERRAEVPTAHPSPSPRPAGQFQTLV

SEQ ID NO: 294 - protein, 26 aa, Artificial Sequence
  synthetic
TERRAEVPTAHPSPSPRPAGQFQTLV

SEQ ID NO: 295 - protein, 20 aa, Artificial Sequence
  synthetic
VPTAHPSPSPRPAGQFQTLV

SEQ ID NO: 296 - protein, 168 aa, Artificial Sequence
  synthetic
LRHRRQGKHWTSTQRKADFQHPAGAVGPEPTDRGLQWRSSPAADAQEENLYAAVKHTQPEDGVEMDTRSPHDEDPQANLYAAVKHSRPRREMASPPSPLSGEFLDTKDRQAEEDRQMDTEAAASEAPQDNLYAAVHSLTLRREATEPPPSQEGPSPAVPNLYAAVAIH

SEQ ID NO: 297 - protein, 168 aa, Artificial Sequence
  synthetic
LRHRRQGKHWTSTQRKADFQHPAGAVGPEPTDRGLQWRSSPAADAQEEVTYAEVKHTQPEDGVEMDTRSPHDEDPQAVTYAEVKHSRPRREMASPPSPLSGEFLDTKDRQAEEDRQMDTEAAASEAPQDVTYAEVHSLTLRREATEPPPSQEGPSPAVPVTYAEVAIH

SEQ ID NO: 298 - protein, 168 aa, Artificial Sequence
  synthetic
LRHRRQGKHWTSTQRKADFQHPAGAVGPEPTDRGLQWRSSPAADAQEEVTYAQLKHTQPEDGVEMDTRSPHDEDPQAVTYAQLKHSRPRREMASPPSPLSGEFLDTKDRQAEEDRQMDTEAAASEAPQDVTYAQLHSLTLRREATEPPPSQEGPSPAVPVTYAQLAIH

SEQ ID NO: 299 - protein, 168 aa, Artificial Sequence
  synthetic
LRHRRQGKHWTSTQRKADFQHPAGAVGPEPTDRGLQWRSSPAADAQEESIYATLKHTQPEDGVEMDTRSPHDEDPQASIYATLKHSRPRREMASPPSPLSGEFLDTKDRQAEEDRQMDTEAAASEAPQDSIYATLHSLTLRREATEPPPSQEGPSPAVPSIYATLAIH

SEQ ID NO: 300 - protein, 168 aa, Artificial Sequence
  synthetic
LRHRRQGKHWTSTQRKADFQHPAGAVGPEPTDRGLQWRSSPAADAQEEVTYAQLKHTQPEDGVEMDTRSPHDEDPQASIYATLKHSRPRREMASPPSPLSGEFLDTKDRQAEEDRQMDTEAAASEAPQDVTYAQLHSLTLRREATEPPPSQEGPSPAVPSIYATLAIH

SEQ ID NO: 301 - protein, 168 aa, Artificial Sequence
  synthetic
LRHRRQGKHWTSTQRKADFQHPAGAVGPEPTDRGLQWRSSPAADAQEETEYATIKHTQPEDGVEMDTRSPHDEDPQATEYATIKHSRPRREMASPPSPLSGEFLDTKDRQAEEDRQMDTEAAASEAPQDVTYAQLHSLTLRREATEPPPSQEGPSPAVPSIYATLAIH

SEQ ID NO: 302 - protein, 168 aa, Artificial Sequence
  synthetic
LRHRRQGKHWTSTQRKADFQHPAGAVGPEPTDRGLQWRSSPAADAQEEVTYAQLKHTQPEDGVEMDTRSPHDEDPQASIYATLKHSRPRREMASPPSPLSGEFLDTKDRQAEEDRQMDTEAAASEAPQDTEYATIHSLTLRREATEPPPSQEGPSPAVPTEYATIAIH

SEQ ID NO: 303 - skipped

SEQ ID NO: 304 - protein, 168 aa, Artificial Sequence
  synthetic
LRHRRQGKHWTSTQRKADFQHPAGAVGPEPTDRGLQWRSSPAADAQEEVTYAQLKHTQPEDGVEMDTRSPHDEDPQATEYATIKHSRPRREMASPPSPLSGEFLDTKDRQAEEDRQMDTEAAASEAPQDTEYATIHSLTLRREATEPPPSQEGPSPAVPSIYATLAIH

SEQ ID NO: 305 - protein, 489 aa, Artificial Sequence
  synthetic
MALPVTALLLPLALLLHAARPDIVMTQSPDSLAVSLGERATISCKSSQSVLYSSNNKNYLAWYQQKPGQPPKLLIYWASTRESGVPDRFSGSGSGTDFTLTISSLQAEDVAVYYCQQYYGTPFTFGGGTKVEIKGGGGSGGGGSGGGGSQVQLVQSGAEVKKPGASVKVSCKASGYTFTDYYLHWVRQAPGQGLEWMGWINPYTGGTNYAQKFQGRVTMTRDTSISTAYMELSRLRSEDTAVYYCARAGASYYDFWSGWVFDYWGQGTLVTVSSTSGPEDQPLTPTGSDPQSGLGRHLGVVIGILVAVILLLLLLLLLFLILRHRRQGKHWTSTQRKADFQHPAGAVGPEPTDRGLQWRSSPAADAQEENLYAAVKHTQPEDGVEMDTRSPHDEDPQAVTYAEVKHSRPRREMASPPSPLSGEFLDTKDRQAEEDRQMDTEAAASEAPQDVTYAQLHSLTLRREATEPPPSQEGPSPAVPSIYATLAIH

SEQ ID NO: 306 - protein, 20 aa, Artificial Sequence
  synthetic
MSVPTQVLGLLLLWLTDARC

SEQ ID NO: 307 - protein, 107 aa, Artificial Sequence [sequence omitted]

SEQ ID NO: 308 - protein, 120 aa, Artificial Sequence
  synthetic
EVQLVESGGGLVQPGGSLRLSCAASGFNIKDTYIHWVRQAPGKGLEWVARIYPTNGYTRYADSVKGRFTISADTSKNTAYLQMNSLRAEDTAVYYCSRWGGDGGYAMDYWGQGTLVTVSS

SEQ ID NO: 309 - protein, 123 aa, Artificial Sequence
  synthetic
QVQLVQSGGGLVQAGGSLRLSCAASGRTFSSYAMAWFRQAPGKEREFVAAISWSGANIYVADSVKGRFTISRDNAKDTVYLQMNSLKPEDTAVYYCAVKLGFAPVEERQYDYWGQGTQVTVSS

SEQ ID NO: 310 - protein, 112 aa, Artificial Sequence [sequence omitted]

SEQ ID NO: 311 - protein, 123 aa, Artificial Sequence
  synthetic
QVQLQQSGAEVKKPGSSVKVSCKASGYTFTDYYIYWVRQAPGQGLEWIGGINPVTQRPVFNEKFKTRVTITVDESTNTAYMELSSLRSEDTAFYFCARQGLWFDSDGRGFDFWGQGSTVTVSS

SEQ ID NO: 312 - protein, 124 aa, Artificial Sequence
  synthetic
EVQQASGGGLVQAGGSLRLSCAASGRTETTSAIAWFRQAPGKEREFVAQISASGLGINYSGTVKGRFTISRDADKTTVYLQMNSLTPEDTAVYYCAAGFHYIAAIRRTTDFHFWGPGTLVTVSS

SEQ ID NO: 313 - protein, 107 aa, Artificial Sequence
  synthetic
EIVLTQSPATLSLSPGERATISCRASQSVSSNFAWYQQRPGQAPRLLIYDASNRATGIPPRFSGSGSGTDFTLTISSLEPEDFAAYYCHQRSNWLYTFGQGTKVDIK

SEQ ID NO: 314 - protein, 117 aa, Artificial Sequence
  synthetic
QVQLQQSGAEVKKPGASVKVSCKASGYTFTGYYMHWVRQAPGQGLEWMGRINPNSGGTNYAQKFQGRVTMTRDTSISTAYMELSRLRSEDTAVYYCARGRYYGMDVWGQGTMVTVSS

SEQ ID NO: 315 - protein, 106 aa, Artificial Sequence
  synthetic
DIVMTQSPSSLSASVGDRVTITCRASQSIRYYLSWYQQKPGKAPKLLIYTASILQNGVPSRFSGSGSGTDFTLTISSLQPEDFATYYCLQTYTTPDFGPGTKVEIK

SEQ ID NO: 316 - protein, 115 aa, Artificial Sequence
  synthetic
QVQLVQSGAEVEKPGASVKVSCKASGYTFTDYYMHWVRQAPGQGLEWMGWINPNSGGTNYAQKFQGRVTMTRDTSISTAYMELSRLRSDDTAVYYCASGWDFDYWGQGTLVTVSS

SEQ ID NO: 317 - protein, 112 aa, Artificial Sequence
  synthetic
DIQMTQSPSSLSASVGDRVTITCKSSQSVLYSSNQKNYLAWFQQKPGKAPKLLIYWASTRESGVPSRFSGSGSGTDFTLTISSLQPEDFATYFCHQYLSSYTFGQGTKVEIK

SEQ ID NO: 318 - protein, 116 aa, Artificial Sequence
  synthetic
EVQLVESGGGLVQPGGSLRLSCAASGYTFTTYWMHWVRQAPGKGLEWVGYIRPSTGYTEYNQKFKDRFTISADTSKNTAYLQMNSLRAEDTAVYYCARSRWLLDYWGQGTLVTVSS

SEQ ID NO: 319 - protein, 27 aa, Artificial Sequence
  synthetic
FWVLVVVGGVLACYSLLVTVAFIIFWV

SEQ ID NO: 320 - protein, 24 aa, Artificial Sequence
  synthetic
IYIWAPLAGTCGVLLLSLVITLYC

SEQ ID NO: 321 - DNA, 2991 bp, Artificial Sequence
  synthetic
atggcgctgccagtcactgcattgttattgcctctggccctgcttctccatgcggcaaggccacaggtgcaactggttcaatctggtgctgaggtgaaaaagcccggcgcatccgtgaaagtgagctgtaaggcatcagggtacaccttcaccagctatcacatacaatgggtccgccaggcccccggacagaggttggaatggattgggtggatttacccgggtgacggctcaacccagtacaatgagaagttcaagggcagggtgactatcacacgcgatacctccgcgagcacagcttacatggagttatctagcctgagatccgaagatacggcggtgtattactgcgcgcgggaagggacctactatgccatggactattggggacaagggaccctggttaccgtgagttctgggggcgggggttccgggggagggggatctgggggtggagggagcgatgtggtaatgacccagacacctttgtctttgagtgtcacccccggacagccggcaagtatatcctgtagatcatcccaatcaatcgtgcactccaacggaaacacatacttggaatggtatctccagaaacctggacagtccccacagttgctcatctacaaagtgtcaaatcgcttttcaggcgtgcccgatcgtttcagcggctcaggctccgggacagactttacattgaagattagccgcgtagaggcagaggatgtgggcgtttactattgttttcaagggtcacacgtgccacgcacattcggcggcggtaccaaggtggaaattaagggccccacttctaccagtggaccggaagatcaaccacttacaccaacgggcagcgacccccagtcaggcctagggcgccacctgggtgtggtcatcgggatactggtcgctgtcatcctgcttctgctccttctcttgctcctattcctaatcctgcgccacaggagacagggcaagcactggaccagcacccagcggaaggccgactttcagcaccctgccggcgccgtgggccctgagcctaccgacaggggcctgcagtggaggagctccccagccgccgatgcccaggaggagaatctgtacgccgccgtgaagcacacccagccagaggacggcgtggagatggacacccgctccccacacgacgaggacccacaggccgtgacctacgccgaggtgaagcacagccgccccagacgcgagatggccagcccacccagccccctgtccggcgagttcctggacaccaaggacaggcaggccgaggaggaccggcagatggacaccgaggccgccgcctccgaggccccccaggacgtgacctacgcccagctgcactccctgaccctgcggagagaggccaccgagcccccacccagccaggagggcccctcccccgccgtgcctagcatctacgccaccctggccatccacggatccggggaaggccgaggctcccttctaacatgtggagatgtcgaggaaaaccctggccctatggcgctgccagtcactgcattgttattgcctctggccctgcttctccatgcggcgcgcccagacatccagatgacccaatccccaagcagtctctcagccagcgtgggagacagggttacaatcacgtgccgcgccagccaggacgtcaacaccgctgtggcttggtatcagcaaaagcccgggaaggcaccaaagctgcttatttatagcgcctccttcttgtattctggagtgccatccaggttttccgggtcacgtagcgggactgactttaccctcaccatatccagcctccagcccgaggatttcgccacctattactgtcagcaacactacacgactccaccgacttttggacagggcactaaagtggagattaagggcagcacgagtgggagtggaaagcccggcagcggggaggggtctaccaagggagaggtccagctggttgaatccggaggcgggcttgtgcaacctggaggctccctgaggcttagttgtgccgcgtcaggattcaacattaaggatacctatattcattgggtccgacaagccccgggcaagggcttggagtgggtggccagaatctatccgaccaacggatatacaaggtacgccgattctgtgaaaggacgcttcaccatcagcgcggacacatccaaaaacacagcctatctgcagatgaactcccttcgcgccgaggatacagccgtgtactattgtagtcggtggggaggcgacggcttctacgcgatggactattggggacaaggaacactggtgactgtcagtagcactacgaccccagcacctagacctcccaccccagctccaactatagcttcccagccattgtctctccggccagaggcgtgtcgaccagccgctggaggggccgttcatacaagaggactcgatttcgcttgcgatatctacatatgggcccctcttgccgggacatgcggtgtcctgcttctaagcttggttattaccctctattgcaaaagaggacgaaagaaactgctttatatattcaagcaacctttcatgcgccccgtacagaccacgcaggaggaagatgggtgtagctgtcgcttccctgaggaagaggaaggtggatgcgagttgcgggtgaagttcagtcgatccgccgatgcgcctgcctatcagcaagggcagaaccagctttataacgagttaaaccttggccgccgggaagagtatgacgtgttggacaagcgtcgcgggagagaccctgagatgggcggaaaaccaaggagaaaaaatccacaggaaggcttatataacgagttgcagaaagacaagatggccgaggcatactccgaaatcggaatgaagggcgagcgacggcgcggcaaaggccacgatggactctatcagggcttaagcaccgccaccaaagacacctacgatgcacttcatatgcaggcactcccacctagatgataa

SEQ ID NO: 322 - protein, 995 aa, Artificial Sequence
  synthetic
MALPVTALLLPLALLLHAARPQVQLVQSGAEVKKPGASVKVSCKASGYTFTSYHIQWVRQAPGQRLEWIGWIYPGDGSTQYNEKFKGRVTITRDTSASTAYMELSSLRSEDTAVYYCAREGTYYAMDYWGQGTLVTVSSGGGGSGGGGSGGGGSDVVMTQTPLSLSVTPGQPASISCRSSQSIVHSNGNTYLEWYLQKPGQSPQLLIYKVSNRFSGVPDRFSGSGSGTDFTLKISRVEAEDVGVYYCFQGSHVPRTFGGGTKVEIKGPTSTSGPEDQPLTPTGSDPQSGLGRHLGVVIGILVAVILLLLLLLLLFLILRHRRQGKHWTSTQRKADFQHPAGAVGPEPTDRGLQWRSSPAADAQEENLYAAVKHTQPEDGVEMDTRSPHDEDPQAVTYAEVKHSRPRREMASPPSPLSGEFLDTKDRQAEEDRQMDTEAAASEAPQDVTYAQLHSLTLRREATEPPPSQEGPSPAVPSIYATLAIHGSGEGRGSLLTCGDVEENPGPMALPVTALLLPLALLLHAARPDIQMTQSPSSLSASVGDRVTITCRASQDVNTAVAWYQQKPGKAPKLLIYSASFLYSGVPSRFSGSRSGTDFTLTISSLQPEDFATYYCQQHYTTPPTFGQGTKVEIKGSTSGSGKPGSGEGSTKGEVQLVESGGGLVQPGGSLRLSCAASGFNIKDTYIHWVRQAPGKGLEWVARIYPTNGYTRYADSVKGRFTISADTSKNTAYLQMNSLRAEDTAVYYCSRWGGDGFYAMDYWGQGTLVTVSSTTTPAPRPPTPAPTIASQPLSLRPEACRPAAGGAVHTRGLDFACDIYIWAPLAGTCGVLLLSLVITLYCKRGRKKLLYIFKQPFMRPVQTTQEEDGCSCRFPEEEEGGCELRVKFSRSADAPAYQQGQNQLYNELNLGRREEYDVLDKRRGRDPEMGGKPRRKNPQEGLYNELQKDKMAEAYSEIGMKGERRRGKGHDGLYQGLSTATKDTYDALHMQALPPR

SEQ ID NO: 323 - DNA, 3015 bp, Artificial Sequence
  synthetic
atggcgctgccagtcactgcattgttattgcctctggccctgcttctccatgcggcaaggccagatatagtgatgacacagtcccccgactccctggctgtctcactgggagaacgagcgacgattagttgtaagtctagccagagcgtcctgtattcaagcaataacaagaattacctcgcctggtatcagcaaaagccgggacagccacccaaactgttgatttactgggccagcacgagagagagcggagtgcccgaccgcttcagcggatccgggtcaggcacagattttaccctgactattagctcccttcaagcggaagatgtcgccgtctactattgccagcaatattacggaactccattcacattcggcggtgggaccaaagtagagataaagggtggcgggggatccggcggtggcggtagcgggggaggcgggtcccaagtgcaactagtccaatcaggtgccgaagtcaagaaaccaggtgcatccgtgaaagtgtcttgcaaagccagtggctacacttttactgactactatctgcactgggtgcgtcaagcacccggccaggggcttgaatggatgggctggattaacccttatactggagggacaaattacgctcagaagttccagggacgcgttacaatgacccgagacaccagcatcagcacagcgtacatggagttaagtgggctgacttccgacgataccgccgtgtattactgcgctcgggcaggggcctcttactatgatttttggtccggttgggtcttcgattactgggggcagggaaccctggtgacagtgtcctcaggccccacttctaccagtggaccggaagatcaaccacttacaccaacgggcagcgacccccagtcaggcctagggcgccacctgggtgtggtcatcgggatactggtcgctgtcatcctgcttctgctccttctcttgctcctattcctaatcctgcgccacaggagacagggcaagcactggaccagcacccagcggaaggccgactttcagcaccctgccggcgccgtgggccctgagcctaccgacaggggcctgcagtggaggagctccccagccgccgatgcccaggaggagaatctgtacgccgccgtgaagcacacccagccagaggacggcgtggagatggacacccgctccccacacgacgaggacccacaggccgtgacctacgccgaggtgaagcacagccgccccagacgcgagatggccagcccacccagccccctgtccggcgagttcctggacaccaaggacaggcaggccgaggaggaccggcagatggacaccgaggccgccgcctccgaggccccccaggacgtgacctacgcccagctgcactccctgaccctgcggagagaggccaccgagcccccacccagccaggagggcccctcccccgccgtgcctagcatctacgccaccctggccatccacggatccggggaaggccgaggctcccttctaacatgtggagatgtcgaggaaaaccctggccctatggcgctgccagtcactgcattgttattgcctctggccctgcttctccatgcggcgcgcccagacatccagatgacccaatccccaagcagtctctcagccagcgtgggagacagggttacaatcacgtgccgcgccagccaggacgtcaacaccgctgtggcttggtatcagcaaaagcccgggaaggcaccaaagctgcttatttatagcgcctccttcttgtattctggagtgccatccaggttttccgggtcacgtagcgggactgactttaccctcaccatatccagcctccagcccgaggatttcgccacctattactgtcagcaacactacacgactccaccgacttttggacagggcactaaagtggagattaagggcagcacgagtgggagtggaaagcccggcagcggggaggggtctaccaagggagaggtccagctggttgaatccggaggcgggcttgtgcaacctggaggctccctgaggcttagttgtgccgcgtcaggattcaacattaaggatacctatattcattgggtccgacaagccccgggcaagggcttggagtgggtggccagaatctatccgaccaacggatatacaaggtacgccgattctgtgaaaggacgcttcaccatcagcgcggacacatccaaaaacacagcctatctgcagatgaactcccttcgcgccgaggatacagccgtgtactattgtagtcggtggggaggcgacggcttctacgcgatggactattggggacaaggaacactggtgactgtcagtagcactacgaccccagcacctagacctcccaccccagctccaactatagcttcccagccattgtctctccggccagaggcgtgtcgaccagccgctggaggggccgttcatacaagaggactcgatttcgcttgcgatatctacatatgggcccctcttgccgggacatgcggtgtcctgcttctaagcttggttattaccctctattgcaaaagaggacgaaagaaactgctttatatattcaagcaacctttcatgcgccccgtacagaccacgcaggaggaagatgggtgtagctgtcgcttccctgaggaagaggaaggtggatgcgagttgcgggtgaagttcagtcgatccgccgatgcgcctgcctatcagcaagggcagaaccagctttataacgagttaaaccttggccgccgggaagagtatgacgtgttggacaagcgtcgcgggagagaccctgagatgggcggaaaaccaaggagaaaaaatccacaggaaggcttatataacgagttgcagaaagacaagatggccgaggcatactccgaaatcggaatgaagggcgagcgacggcgcggcaaaggccacgatggactctatcagggcttaagcaccgccaccaaagacacctacgatgcacttcatatgcaggcactcccacctagatgataa

SEQ ID NO: 324 - protein, 1003 aa, Artificial Sequence
  synthetic
MALPVTALLLPLALLLHAARPDIVMTQSPDSLAVSLGERATISCKSSQSVLYSSNNKNYLAWYQQKPGQPPKLLIYWASTRESGVPDRFSGSGSGTDFTLTISSLQAEDVAVYYCQQYYGTPFTFGGGTKVEIKGGGGSGGGGSGGGGSQVQLVQSGAEVKKPGASVKVSCKASGYTFTDYYLHWVRQAPGQGLEWMGWINPYTGGTNYAQKFQGRVTMTRDTSISTAYMELSGLTSDDTAVYYCARAGASYYDFWSGWVFDYWGQGTLVTVSSGPTSTSGPEDQPLTPTGSDPQSGLGRHLGVVIGILVAVILLLLLLLLLFLILRHRRQGKHWTSTQRKADFQHPAGAVGPEPTDRGLQWRSSPAADAQEENLYAAVKHTQPEDGVEMDTRSPHDEDPQAVTYAEVKHSRPRREMASPPSPLSGEFLDTKDRQAEEDRQMDTEAAASEAPQDVTYAQLHSLTLRREATEPPPSQEGPSPAVPSIYATLAIHGSGEGRGSLLTCGDVEENPGPMALPVTALLLPLALLLHAARPDIQMTQSPSSLSASVGDRVTITCRASQDVNTAVAWYQQKPGKAPKLLIYSASFLYSGVPSRFSGSRSGTDFTLTISSLQPEDFATYYCQQHYTTPPTFGQGTKVEIKGSTSGSGKPGSGEGSTKGEVQLVESGGGLVQPGGSLRLSCAASGFNIKDTYIHWVRQAPGKGLEWVARIYPTNGYTRYADSVKGRFTISADTSKNTAYLQMNSLRAEDTAVYYCSRWGGDGFYAMDYWGQGTLVTVSSTTTPAPRPPTPAPTIASQPLSLRPEACRPAAGGAVHTRGLDFACDIYIWAPLAGTCGVLLLSLVITLYCKRGRKKLLYIFKQPFMRPVQTTQEEDGCSCRFPEEEEGGCELRVKFSRSADAPAYQQGQNQLYNELNLGRREEYDVLDKRRGRDPEMGGKPRRKNPQEGLYNELQKDKMAEAYSEIGMKGERRRGKGHDGLYQGLSTATKDTYDALHMQALPPR

SEQ ID NO: 325 - DNA, 3003 bp, Artificial Sequence
  synthetic
atggcgctgccagtcactgcattgttattgcctctggccctgcttctccatgcggcaaggccagatatagtgatgacacagtcccccgactccctggctgtctcactgggagaacgagcgacgattagttgtaagtctagccagagcgtcctgtattcaagcaataacaagaattacctcgcctggtatcagcaaaagccgggacagccacccaaactgttgatttactgggccagcacgagagagagcggagtgcccgaccgcttcagcggatccgggtcaggcacagattttaccctgactattagctcccttcaagcggaagatgtcgccgtctactattgccagcaatattacggaactccattcacattcggcggtgggaccaaagtagagataaagggtggcgggggatccggcggtggcggtagcgggggaggcgggtcccaagtgcaactagtccaatcaggtgccgaagtcaagaaaccaggtgcatccgtgaaagtgtcttgcaaagccagtggctacacttttactgactactatctgcactgggtgcgtcaagcacccggccaggggcttgaatggatgggctggattaacccttatactggagggacaaattacgctcagaagttccagggacgcgttacaatgacccgagacaccagcatcagcacagcgtacatggagttaagtaggctgaggtccgaagataccgccgtgtattactgcgctcgggcaggggcctcttactatgatttttggtccggttgggtcttcgattactgggggcagggaaccctggtgacagtgtcctcaaccagtggaccggaagatcaaccacttacaccaacgggcagcgacccccagtcaggcctagggcgccacctgggtgtggtcatcgggatactggtcgctgtcatcctgcttctgctccttctcttgctcctattcctaatcctgcgccacaggagacagggcaagcactggaccagcacccagcggaaggccgactttcagcaccctgccggcgccgtgggccctgagcctaccgacaggggcctgcagtggaggagctccccagccgccgatgcccaggaggagaatctgtacgccgccgtgaagcacacccagccagaggacggcgtggagatggacacccgctccccacacgacgaggacccacaggccgtgacctacgccgaggtgaagcacagccgccccagacgcgagatggccagcccacccagccccctgtccggcgagttcctggacaccaaggacaggcaggccgaggaggaccggcagatggacaccgaggccgccgcctccgaggccccccaggacgtgacctacgcccagctgcactccctgaccctgcggagagaggccaccgagcccccacccagccaggagggcccctcccccgccgtgcctagcatctacgccaccctggccatccacggatccggggaaggccgaggctcccttctaacatgtggagatgtcgaggaaaaccctggccctatggcgctgccagtcactgcattgttattgcctctggccctgcttctccatgcggcgcgcccagacatccagatgacccaatccccaagcagtctctcagccagcgtgggagacagggttacaatcacgtgccgcgccagccaggacgtcaacaccgctgtggcttggtatcagcaaaagcccgggaaggcaccaaagctgcttatttatagcgcctccttcttgtattctggagtgccatccaggttttccgggtcacgtagcgggactgactttaccctcaccatatccagcctccagcccgaggatttcgccacctattactgtcagcaacactacacgactccaccgacttttggacagggcactaaagtggagattaagggcagcacgagtgggagtggaaagcccggcagcggggaggggtctaccaagggagaggtccagctggttgaatccggaggcgggcttgtgcaacctggaggctccctgaggcttagttgtgccgcgtcaggattcaacattaaggatacctatattcattgggtccgacaagccccgggcaagggcttggagtgggtggccagaatctatccgaccaacggatatacaaggtacgccgattctgtgaaaggacgcttcaccatcagcgcggacacatccaaaaacacagcctatctgcagatgaactcccttcgcgccgaggatacagccgtgtactattgtagtcggtggggaggcgacggcttctacgcgatggactattggggacaaggaacactggtgactgtcagtagcactacgaccccagcacctagacctcccaccccagctccaactatagcttcccagccattgtctctccggccagaggcgtgtcgaccagccgctggaggggccgttcatacaagaggactcgatttcgcttgcgatatctacatatgggcccctcttgccgggacatgcggtgtcctgcttctaagcttggttattaccctctattgcaaaagaggacgaaagaaactgctttatatattcaagcaacctttcatgcgccccgtacagaccacgcaggaggaagatgggtgtagctgtcgcttccctgaggaagaggaaggtggatgcgagttgcgggtgaagttcagtcgatccgccgatgcgcctgcctatcagcaagggcagaaccagctttataacgagttaaaccttggccgccgggaagagtatgacgtgttggacaagcgtcgcgggagagaccctgagatgggcggaaaaccaaggagaaaaaatccacaggaaggcttatataacgagttgcagaaagacaagatggccgaggcatactccgaaatcggaatgaagggcgagcgacggcgcggcaaaggccacgatggactctatcagggcttaagcaccgccaccaaagacacctacgatgcacttcatatgcaggcactcccacctagatgataa

SEQ ID NO: 326 - protein, 999 aa, Artificial Sequence
  synthetic
MALPVTALLLPLALLLHAARPDIVMTQSPDSLAVSLGERATISCKSSQSVLYSSNNKNYLAWYQQKPGQPPKLLIYWASTRESGVPDRFSGSGSGTDFTLTISSLQAEDVAVYYCQQYYGTPFTFGGGTKVEIKGGGGSGGGGSGGGGSQVQLVQSGAEVKKPGASVKVSCKASGYTFTDYYLHWVRQAPGQGLEWMGWINPYTGGTNYAQKFQGRVTMTRDTSISTAYMELSRLRSEDTAVYYCARAGASYYDFWSGWVFDYWGQGTLVTVSSTSGPEDQPLTPTGSDPQSGLGRHLGVVIGILVAVILLLLLLLLLFLILRHRRQGKHWTSTQRKADFQHPAGAVGPEPTDRGLQWRSSPAADAQEENLYAAVKHTQPEDGVEMDTRSPHDEDPQAVTYAEVKHSRPRREMASPPSPLSGEFLDTKDRQAEEDRQMDTEAAASEAPQDVTYAQLHSLTLRREATEPPPSQEGPSPAVPSIYATLAIHGSGEGRGSLLTCGDVEENPGPMALPVTALLLPLALLLHAARPDIQMTQSPSSLSASVGDRVTITCRASQDVNTAVAWYQQKPGKAPKLLIYSASFLYSGVPSRFSGSRSGTDFTLTISSLQPEDFATYYCQQHYTTPPTFGQGTKVEIKGSTSGSGKPGSGEGSTKGEVQLVESGGGLVQPGGSLRLSCAASGFNIKDTYIHWVRQAPGKGLEWVARIYPTNGYTRYADSVKGRFTISADTSKNTAYLQMNSLRAEDTAVYYCSRWGGDGFYAMDYWGQGTLVTVSSTTTPAPRPPTPAPTIASQPLSLRPEACRPAAGGAVHTRGLDFACDIYIWAPLAGTCGVLLLSLVITLYCKRGRKKLLYIFKQPFMRPVQTTQEEDGCSCRFPEEEEGGCELRVKFSRSADAPAYQQGQNQLYNELNLGRREEYDVLDKRRGRDPEMGGKPRRKNPQEGLYNELQKDKMAEAYSEIGMKGERRRGKGHDGLYQGLSTATKDTYDALHMQALPPR

SEQ ID NO: 327 - protein, 481 aa, Artificial Sequence
  synthetic
MALPVTALLLPLALLLHAARPQVQLVQSGAEVKKPGASVKVSCKASGYTFTSYHIQWVRQAPGQRLEWIGWIYPGDGSTQYNEKFKGRVTITRDTSASTAYMELSSLRSEDTAVYYCAREGTYYAMDYWGQGTLVTVSSGGGGSGGGGSGGGGSDVVMTQTPLSLSVTPGQPASISCRSSQSIVHSNGNTYLEWYLQKPGQSPQLLIYKVSNRFSGVPDRFSGSGSGTDFTLKISRVEAEDVGVYYCFQGSHVPRTFGGGTKVEIKTERRAEVPTAHPSPSPRPAGQFQTLVVGVVGGLLGSLVLLVWVLAVILRHRRQGKHWTSTQRKADFQHPAGAVGPEPTDRGLQWRSSPAADAQEENLYAAVKHTQPEDGVEMDTRSPHDEDPQANLYAAVKHSRPRREMASPPSPLSGEFLDTKDRQAEEDRQMDTEAAASEAPQDNLYAAVHSLTLRREATEPPPSQEGPSPAVPNLYAAVAIH

SEQ ID NO: 328 - protein, 481 aa, Artificial Sequence
  synthetic
MALPVTALLLPLALLLHAARPQVQLVQSGAEVKKPGASVKVSCKASGYTFTSYHIQWVRQAPGQRLEWIGWIYPGDGSTQYNEKFKGRVTITRDTSASTAYMELSSLRSEDTAVYYCAREGTYYAMDYWGQGTLVTVSSGGGGSGGGGSGGGGSDVVMTQTPLSLSVTPGQPASISCRSSQSIVHSNGNTYLEWYLQKPGQSPQLLIYKVSNRFSGVPDRFSGSGSGTDFTLKISRVEAEDVGVYYCFQGSHVPRTFGGGTKVEIKTERRAEVPTAHPSPSPRPAGQFQTLVVGVVGGLLGSLVLLVWVLAVILRHRRQGKHWTSTQRKADFQHPAGAVGPEPTDRGLQWRSSPAADAQEEVTYAEVKHTQPEDGVEMDTRSPHDEDPQAVTYAEVKHSRPRREMASPPSPLSGEFLDTKDRQAEEDRQMDTEAAASEAPQDVTYAEVHSLTLRREATEPPPSQEGPSPAVPVTYAEVAIH

SEQ ID NO: 329 - protein, 481 aa, Artificial Sequence
  synthetic
MALPVTALLLPLALLLHAARPQVQLVQSGAEVKKPGASVKVSCKASGYTFTSYHIQWVRQAPGQRLEWIGWIYPGDGSTQYNEKFKGRVTITRDTSASTAYMELSSLRSEDTAVYYCAREGTYYAMDYWGQGTLVTVSSGGGGSGGGGSGGGGSDVVMTQTPLSLSVTPGQPASISCRSSQSIVHSNGNTYLEWYLQKPGQSPQLLIYKVSNRFSGVPDRFSGSGSGTDFTLKISRVEAEDVGVYYCFQGSHVPRTFGGGTKVEIKTERRAEVPTAHPSPSPRPAGQFQTLVVGVVGGLLGSLVLLVWVLAVILRHRRQGKHWTSTQRKADFQHPAGAVGPEPTDRGLQWRSSPAADAQEEVTYAQLKHTQPEDGVEMDTRSPHDEDPQAVTYAQLKHSRPRREMASPPSPLSGEFLDTKDRQAEEDRQMDTEAAASEAPQDVTYAQLHSLTLRREATEPPPSQEGPSPAVPVTYAQLAIH

SEQ ID NO: 330 - protein, 481 aa, Artificial Sequence
  synthetic
MALPVTALLLPLALLLHAARPQVQLVQSGAEVKKPGASVKVSCKASGYTFTSYHIQWVRQAPGQRLEWIGWIYPGDGSTQYNEKFKGRVTITRDTSASTAYMELSSLRSEDTAVYYCAREGTYYAMDYWGQGTLVTVSSGGGGSGGGGSGGGGSDVVMTQTPLSLSVTPGQPASISCRSSQSIVHSNGNTYLEWYLQKPGQSPQLLIYKVSNRFSGVPDRFSGSGSGTDFTLKISRVEAEDVGVYYCFQGSHVPRTFGGGTKVEIKTERRAEVPTAHPSPSPRPAGQFQTLVVGVVGGLLGSLVLLVWVLAVILRHRRQGKHWTSTQRKADFQHPAGAVGPEPTDRGLQWRSSPAADAQEESIYATLKHTQPEDGVEMDTRSPHDEDPQASIYATLKHSRPRREMASPPSPLSGEFLDTKDRQAEEDRQMDTEAAASEAPQDSIYATLHSLTLRREATEPPPSQEGPSPAVPSIYATLAIH

SEQ ID NO: 331 - protein, 481 aa, Artificial Sequence
  synthetic
MALPVTALLLPLALLLHAARPQVQLVQSGAEVKKPGASVKVSCKASGYTFTSYHIQWVRQAPGQRLEWIGWIYPGDGSTQYNEKFKGRVTITRDTSASTAYMELSSLRSEDTAVYYCAREGTYYAMDYWGQGTLVTVSSGGGGSGGGGSGGGGSDVVMTQTPLSLSVTPGQPASISCRSSQSIVHSNGNTYLEWYLQKPGQSPQLLIYKVSNRFSGVPDRFSGSGSGTDFTLKISRVEAEDVGVYYCFQGSHVPRTFGGGTKVEIKTERRAEVPTAHPSPSPRPAGQFQTLVVGVVGGLLGSLVLLVWVLAVILRHRRQGKHWTSTQRKADFQHPAGAVGPEPTDRGLQWRSSPAADAQEEVTYAQLKHTQPEDGVEMDTRSPHDEDPQASIYATLKHSRPRREMASPPSPLSGEFLDTKDRQAEEDRQMDTEAAASEAPQDVTYAQLHSLTLRREATEPPPSQEGPSPAVPSIYATLAIH

SEQ ID NO: 332 - protein, 481 aa, Artificial Sequence
  synthetic
MALPVTALLLPLALLLHAARPQVQLVQSGAEVKKPGASVKVSCKASGYTFTSYHIQWVRQAPGQRLEWIGWIYPGDGSTQYNEKFKGRVTITRDTSASTAYMELSSLRSEDTAVYYCAREGTYYAMDYWGQGTLVTVSSGGGGSGGGGSGGGGSDVVMTQTPLSLSVTPGQPASISCRSSQSIVHSNGNTYLEWYLQKPGQSPQLLIYKVSNRFSGVPDRFSGSGSGTDFTLKISRVEAEDVGVYYCFQGSHVPRTFGGGTKVEIKTERRAEVPTAHPSPSPRPAGQFQTLVVGVVGGLLGSLVLLVWVLAVILRHRRQGKHWTSTQRKADFQHPAGAVGPEPTDRGLQWRSSPAADAQEETEYATIKHTQPEDGVEMDTRSPHDEDPQATEYATIKHSRPRREMASPPSPLSGEFLDTKDRQAEEDRQMDTEAAASEAPQDVTYAQLHSLTLRREATEPPPSQEGPSPAVPSIYATLAIH

SEQ ID NO: 333 - protein, 481 aa, Artificial Sequence
  synthetic
MALPVTALLLPLALLLHAARPQVQLVQSGAEVKKPGASVKVSCKASGYTFTSYHIQWVRQAPGQRLEWIGWIYPGDGSTQYNEKFKGRVTITRDTSASTAYMELSSLRSEDTAVYYCAREGTYYAMDYWGQGTLVTVSSGGGGSGGGGSGGGGSDVVMTQTPLSLSVTPGQPASISCRSSQSIVHSNGNTYLEWYLQKPGQSPQLLIYKVSNRFSGVPDRFSGSGSGTDFTLKISRVEAEDVGVYYCFQGSHVPRTFGGGTKVEIKTERRAEVPTAHPSPSPRPAGQFQTLVVGVVGGLLGSLVLLVWVLAVILRHRRQGKHWTSTQRKADFQHPAGAVGPEPTDRGLQWRSSPAADAQEEVTYAQLKHTQPEDGVEMDTRSPHDEDPQASIYATLKHSRPRREMASPPSPLSGEFLDTKDRQAEEDRQMDTEAAASEAPQDTEYATIHSLTLRREATEPPPSQEGPSPAVPTEYATIAIH

SEQ ID NO: 334 - protein, 481 aa, Artificial Sequence
  synthetic
MALPVTALLLPLALLLHAARPQVQLVQSGAEVKKPGASVKVSCKASGYTFTSYHIQWVRQAPGQRLEWIGWIYPGDGSTQYNEKFKGRVTITRDTSASTAYMELSSLRSEDTAVYYCAREGTYYAMDYWGQGTLVTVSSGGGGSGGGGSGGGGSDVVMTQTPLSLSVTPGQPASISCRSSQSIVHSNGNTYLEWYLQKPGQSPQLLIYKVSNRFSGVPDRFSGSGSGTDFTLKISRVEAEDVGVYYCFQGSHVPRTFGGGTKVEIKTERRAEVPTAHPSPSPRPAGQFQTLVVGVVGGLLGSLVLLVWVLAVILRHRRQGKHWTSTQRKADFQHPAGAVGPEPTDRGLQWRSSPAADAQEEVTYAQLKHTQPEDGVEMDTRSPHDEDPQATEYATIKHSRPRREMASPPSPLSGEFLDTKDRQAEEDRQMDTEAAASEAPQDTEYATIHSLTLRREATEPPPSQEGPSPAVPSIYATLAIH

What is claimed is:

1. A bicistronic iCAR/aCAR construct or monocistronic aCAR and iCAR constructs for co-transduction comprising:
an iCAR portion, wherein the iCAR portion comprises:
an iCAR single chain variable fragment (scFv) component optionally in the VH-VL or VL-VH orientation;
an iCAR hinge domain component;
an iCAR transmembrane (TM) domain component;
an iCAR inhibitory domain component; and
an aCAR portion, wherein the iCAR portion comprises:
an aCAR single chain variable fragment (scFv) component optionally in the VH-VL or VL-VH orientation;
an aCAR hinge domain component;
an aCAR co-stimulatory domain component an aCAR activation signaling domain; and
a linker that connects the iCAR portion in (i) and the aCAR portion in (ii).

2. The bicistronic iCAR/aCAR construct or monocistronic aCAR and iCAR constructs for co-transduction according to claim 1, wherein the linker connecting the VH-VL or VL-VH in either orientation comprises one or more linker selected from the group consisting of (G4S)X3 linker (SEQ ID NO:81), G4S (SEQ ID NO:153), (G4S)X3 (SEQ ID NO:154), and Whitlow linker (SEQ ID NO:82).

3. The bicistronic iCAR/aCAR construct or monocistronic aCAR and iCAR constructs for co-transduction according to claim 1 or 2, wherein the iCAR scFv component targets an HLA antigen.

4. The bicistronic iCAR/aCAR construct or monocistronic aCAR and iCAR constructs for co-transduction according to any one of claims 1 to 3, wherein the HLA antigen is selected from the group consisting of HLA-A2, HLA-A3, HLA-A, HLA-B, HLA-C, HLA-G, HLA-E, HLA-F, HLA-DPA1, HLA-DQA1, HLA-DQB1, HLA-DQB2, HLA-DRB1, and HLA-DRB5.

5. The bicistronic iCAR/aCAR construct or monocistronic aCAR and iCAR constructs for co-transduction according to any one of claims 1 to 4, wherein the iCAR scFv component is selected from the group consisting of BB7.2, 3PF12, 3PF12/C4, 3PF12/F12, 3PF12/B11, W6/32, BBM.1, SN66E3, Ha5C2.A2, MWB1, MWB1-mod, Hz.BB7.2 VH1-69_A18VK, Hz.BB7.2 VH1-69 (27,30)_A18, Hz.BB7.2 VH1-69 (27,30,48)_A18, Hz.BB7.2 VH1-69 (27,30,67)_A18, Hz.BB7.2 VH1-69 (27,30,69)_A18, Hz.BB7.2 VH1-69 (27,30,67,69)_A18, Hz.BB7.2 VH1-3_A18, Hz.BB7.2 VH1-3(48)_A18, Hz.BB7.2 VH1-3(67)_A18, Hz.BB7.2 VH1-3(69)_A18, Hz.BB7.2 VH1-3(71)_A18, Hz.BB7.2 VH1-3(73)_A18, MWB1.2, SN66E3.2 and SN66E3.3.

6. The bicistronic iCAR/aCAR construct or monocistronic aCAR and iCAR constructs for co-transduction according to any one of claims 1 to 5, wherein the iCAR scFv component is BB7.2.

7. The bicistronic iCAR/aCAR construct or monocistronic aCAR and iCAR constructs for co-transduction according to claim 6, wherein the iCAR scFv comprises the Vh and Vl from BB7.2 (SEQ ID NOs: 37 and 38) or vhCDR1, vhCDR2, vhCDR3, vlCDR1, vlCDR2, and vlCDR3 from SEQ ID NOs: 37 and 38.

8. The bicistronic iCAR/aCAR construct or monocistronic aCAR and iCAR constructs for co-transduction according to claim 6, wherein the iCAR scFv comprises the Vh and Vl from Hz.BB7.2 VH1-69_A18VK (SEQ ID NOs: 57 and 58) or vhCDR1, vhCDR2, vhCDR3, vlCDR1, vlCDR2, and vlCDR3 from SEQ ID NOs: 57 and 58.

9. The bicistronic iCAR/aCAR construct or monocistronic aCAR and iCAR constructs for co-transduction according to claim 6, wherein the iCAR scFv comprises the Vh and Vl from Hz.BB7.2 VH1-69 (27,30)_A18 (SEQ ID NOs: 59 and 60) or vhCDR1, vhCDR2, vhCDR3, vlCDR1, vlCDR2, and vlCDR3 from SEQ ID NOs: 59 and 60.

10. The bicistronic iCAR/aCAR construct or monocistronic aCAR and iCAR constructs for co-transduction according to claim 6, wherein the iCAR scFv comprises the Vh and Vl from Hz.BB7.2 VH1-69 (27,30,48)_A18 (SEQ ID NOs: 61 and 62) or vhCDR1, vhCDR2, vhCDR3, vlCDR1, vlCDR2, and vlCDR3 from SEQ ID NOs: 61 and 62.

11. The bicistronic iCAR/aCAR construct or monocistronic aCAR and iCAR constructs for co-transduction according to claim 6, wherein the iCAR scFv comprises the Vh and Vl from Hz.BB7.2 VH1-69 (27,30,67)_A18 (SEQ ID NOs: 63 and 64) or vhCDR1, vhCDR2, vhCDR3, vlCDR1, vlCDR2, and vlCDR3 from SEQ ID NOs: 63 and 64.

12. The bicistronic iCAR/aCAR construct or monocistronic aCAR and iCAR constructs for co-transduction according to claim 6, wherein the iCAR scFv comprises the Vh and Vl from Hz.BB7.2 VH1-69 (27,30,69)_A18 (SEQ ID NOs: 65 and 66) or vhCDR1, vhCDR2, vhCDR3, vlCDR1, vlCDR2, and vlCDR3 from SEQ ID NOs: 65 and 66.

13. The bicistronic iCAR/aCAR construct or monocistronic aCAR and iCAR constructs for co-transduction according to claim 6, wherein the iCAR scFv comprises the Vh and Vl from Hz.BB7.2 VH1-69 (27,30,67,69)_A18 (SEQ ID NOs: 67 and 68) or vhCDR1, vhCDR2, vhCDR3, vlCDR1, vlCDR2, and vlCDR3 from SEQ ID NOs: 67 and 68.

14. The bicistronic iCAR/aCAR construct or monocistronic aCAR and iCAR constructs for co-transduction according to claim 6, wherein the iCAR scFv comprises the Vh and Vl from Hz.BB7.2 VH1-3_A18 (SEQ ID NOs: 69 and 70) or vhCDR1, vhCDR2, vhCDR3, vlCDR1, vlCDR2, and vlCDR3 from SEQ ID NOs: 69 and 70.

15. The bicistronic iCAR/aCAR construct or monocistronic aCAR and iCAR constructs for co-transduction according to claim 6, wherein the iCAR scFv comprises the Vh and Vl from Hz.BB7.2 VH1-3(48)_A18 (SEQ ID NOs: 71 and 72) or vhCDR1, vhCDR2, vhCDR3, vlCDR1, vlCDR2, and vlCDR3 from SEQ ID NOs: 71 and 72.

16. The bicistronic iCAR/aCAR construct or monocistronic aCAR and iCAR constructs for co-transduction according to claim 6, wherein the iCAR scFv comprises the Vh and Vl from Hz.BB7.2 VH1-3(67)_A18 (SEQ ID NOs: 73 and 74) or vhCDR1, vhCDR2, vhCDR3, vlCDR1, vlCDR2, and vlCDR3 from SEQ ID NOs: 73 and 74.

17. The bicistronic iCAR/aCAR construct or monocistronic aCAR and iCAR constructs for co-transduction according to claim 6, wherein the iCAR scFv comprises the Vh and Vl from Hz.BB7.2 VH1-3(69)_A18 (SEQ ID NOs: 75 and 76) or vhCDR1, vhCDR2, vhCDR3, vlCDR1, vlCDR2, and vlCDR3 from SEQ ID NOs: 75 and 76.

18. The bicistronic iCAR/aCAR construct or monocistronic aCAR and iCAR constructs for co-transduction according to claim 6, wherein the iCAR scFv comprises the Vh and Vl from Hz.BB7.2 VH1-3(71)_A18 (SEQ ID NOs: 77 and 78) or vhCDR1, vhCDR2, vhCDR3, vlCDR1, vlCDR2, and vlCDR3 from SEQ ID NOs: 77 and 78.

19. The bicistronic iCAR/aCAR construct or monocistronic aCAR and iCAR constructs for co-transduction according to claim 6, wherein the iCAR scFv comprises the Vh and Vl from Hz.BB7.2 VH1-3(73)_A18 (SEQ ID NOs: 79 and 80) or vhCDR1, vhCDR2, vhCDR3, vlCDR1, vlCDR2, and vlCDR3 from SEQ ID NOs: 79 and 80.

20. The bicistronic iCAR/aCAR construct or monocistronic aCAR and iCAR constructs for co-transduction according to claim 6, wherein the iCAR scFv is BB7.2 of SEQ ID NO:167.

21. The bicistronic iCAR/aCAR construct or monocistronic aCAR and iCAR constructs for co-transduction according to any one of claims 1 to 4, wherein the iCAR scFv component is 3PF12.

22. The bicistronic iCAR/aCAR construct or monocistronic aCAR and iCAR constructs for co-transduction according to claim 21, wherein the iCAR scFv comprises the Vh and Vl from 3PF12/C4 (SEQ ID NOs: 39 and 40) or vhCDR1, vhCDR2, vhCDR3, vlCDR1, vlCDR2, and vlCDR3 from SEQ ID NOs: 39 and 40.

23. The bicistronic iCAR/aCAR construct or monocistronic aCAR and iCAR constructs for co-transduction according to claim 21, wherein the iCAR scFv comprises the Vh and Vl from 3PF12/F12 (SEQ ID NOs: 41 and 42) or vhCDR1, vhCDR2, vhCDR3, vlCDR1, vlCDR2, and vlCDR3 from SEQ ID NOs: 41 and 42.

24. The bicistronic iCAR/aCAR construct or monocistronic aCAR and iCAR constructs for co-transduction according to claim 21, wherein the iCAR scFv comprises the Vh and Vl from 3PF12/B11 (SEQ ID NOs: 43 and 44) or vhCDR1, vhCDR2, vhCDR3, vlCDR1, vlCDR2, and vlCDR3 from SEQ ID NOs: 43 and 44.

25. The bicistronic iCAR/aCAR construct or monocistronic aCAR and iCAR constructs for co-transduction according to claim 21, wherein the iCAR scFv is 3PF12 of SEQ ID NO:168.

26. The bicistronic iCAR/aCAR construct or monocistronic aCAR and iCAR constructs for co-transduction according to any one of claims 1 to 2, wherein the iCAR scFv component is SN66E3.

27. The bicistronic iCAR/aCAR construct or monocistronic aCAR and iCAR constructs for co-transduction according to claim 26, wherein the iCAR scFv comprises the Vh and Vl from SN66E3.1 (SEQ ID NOs: 49 and 50) or vhCDR1, vhCDR2, vhCDR3, vlCDR1, vlCDR2, and vlCDR3 from SEQ ID NOs: 49 and 50.

28. The bistronic iCAR/aCAR construct or monocistronic aCAR and iCAR constructs for co-transduction according to claim 26, wherein the iCAR scFv is SN66E3.1 of SEQ ID NO:169.

29. The bicistronic iCAR/aCAR construct or monocistronic aCAR and iCAR constructs for co-transduction according to claim 26, wherein the iCAR scFv comprises the Vh and Vl from SN66E3.2 (SEQ ID NOs: 165 and 166) or vhCDR1, vhCDR2, vhCDR3, vlCDR1, vlCDR2, and vlCDR3 from SEQ ID NOs: 165 and 166.

30. The bicistronic iCAR/aCAR construct or monocistronic aCAR and iCAR constructs for co-transduction according to claim 26, wherein the iCAR scFv is SN66E3.2 of SEQ ID NO:285.

31. The bicistronic iCAR/aCAR construct or monocistronic aCAR and iCAR constructs for co-transduction according to claim 26, wherein the iCAR scFv comprises the Vh and Vl from SN66E3.3 (SEQ ID NOs: 283 and 284) or vhCDR1, vhCDR2, vhCDR3, vlCDR1, vlCDR2, and vlCDR3 from SEQ ID NOs: 283 and 284.

32. The bicistronic iCAR/aCAR construct or monocistronic aCAR and iCAR constructs for co-transduction according to claim 26, wherein the iCAR scFv is SN66E3.3 of SEQ ID NO:286.

33. The bicistronic iCAR/aCAR construct or monocistronic aCAR and iCAR constructs for co-transduction according to any one of claims 1 to 4, wherein the iCAR scFv component is W6/32.

34. The bicistronic iCAR/aCAR construct or monocistronic aCAR and iCAR constructs for co-transduction according to claim 33, wherein the iCAR scFv comprises the Vh and Vl from W6/32 (SEQ ID NOs: 45 and 46) or vhCDR1, vhCDR2, vhCDR3, vlCDR1, vlCDR2, and vlCDR3 from SEQ ID NOs: 45 and 46.

35. The bicistronic iCAR/aCAR construct or monocistronic aCAR and iCAR constructs for co-transduction according to any one of claims 1 to 5, wherein the iCAR scFv component is BBM.1.

36. The bicistronic iCAR/aCAR construct or monocistronic aCAR and iCAR constructs for co-transduction according to claim 35, wherein the iCAR scFv comprises the Vh and Vl from BBM.1 (SEQ ID NOs: 47 and 48) or vhCDR1, vhCDR2, vhCDR3, vlCDR1, vlCDR2, and vlCDR3 from SEQ ID NOs: 47 and 48.

37. The bicistronic iCAR/aCAR construct or monocistronic aCAR and iCAR constructs for co-transduction according to any one of claims 1 to 5, wherein the iCAR scFv component is Ha5C2.A2.

38. The bicistronic iCAR/aCAR construct or monocistronic aCAR and iCAR constructs for co-transduction according to claim 33, wherein the iCAR scFv comprises the Vh and Vl from Ha5C2.A2 (SEQ ID NOs: 51 and 52) or vhCDR1, vhCDR2, vhCDR3, vlCDR1, vlCDR2, and vlCDR3 from SEQ ID NOs: 51 and 52.

39. The bicistronic iCAR/aCAR construct or monocistronic aCAR and iCAR constructs for co-transduction according to any one of claims 1 to 5, wherein the iCAR scFv component is MWB1.

40. The bicistronic iCAR/aCAR construct or monocistronic aCAR and iCAR constructs for co-transduction according to claim 39, wherein the iCAR scFv comprises the Vh and Vl from MWB1 (SEQ ID NOs: 53 and 54) or vhCDR1, vhCDR2, vhCDR3, vlCDR1, vlCDR2, and vlCDR3 from SEQ ID NOs: 53 and 54.

41. The bicistronic iCAR/aCAR construct or monocistronic aCAR and iCAR constructs for co-transduction according to claim 35, wherein the iCAR scFv comprises the Vh and Vl from MWB1-mod (MWB1.1) (SEQ ID NOs: 55 and 56) or vhCDR1, vhCDR2, vhCDR3, vlCDR1, vlCDR2, and vlCDR3 from SEQ ID NOs: 55 and 56.

42. The bicistronic iCAR/aCAR construct or monocistronic aCAR and iCAR constructs for co-transduction according to claim 35, wherein the iCAR scFv comprises the Vh and Vl from MWB1.2 (SEQ ID NOs: 163 and 164).

43. The bicistronic iCAR/aCAR construct or monocistronic aCAR and iCAR constructs for co-transduction according to any one of claims 1 to 4, wherein the iCAR scFv is MWB1.1 scFvVH_VL (SEQ ID NO:273).

44. The bicistronic iCAR/aCAR construct or monocistronic aCAR and iCAR constructs for co-transduction according to any one of claims 1 to 5, wherein the iCAR scFv is MWB1.2 scFvVH_VL (SEQ ID NO:274).

45. The bicistronic iCAR/aCAR construct or monocistronic aCAR and iCAR constructs for co-transduction according to any one of claims 1 to 44, wherein the iCAR hinge domain component is selected from a PD-1 hinge, a CD28 hinge, and a CD8 hinge (including a CD8a hinge), a LIR1 Ig3-4 hinge, a LIR1 Ig-4 hinge, a LIR1 52 aa hinge, a LIR1 36 aa hinge, a LIR1 30 aa hinge, a LIR1 26 aa hinge, a LIR1 8 aa hinge, a CD33 hinge, a KIR2DL1 hinge, a PD-1 (47) hinge, a PD-1 (42) hinge, a PD-1 (36) hinge, a PD-1 (30) hinge, a PD-1 (26) hinge, and a PD-1 (20) hinge.

46. The bicistronic iCAR/aCAR construct or monocistronic aCAR and iCAR constructs for co-transduction according to claim 45, wherein the iCAR hinge domain component is a PD-1 hinge (SEQ ID NO:86).

47. The bicistronic iCAR/aCAR construct or monocistronic aCAR and iCAR constructs for co-transduction according to claim 45, wherein the iCAR hinge domain component is a CD28 hinge (SEQ ID NO:85).

48. The bicistronic iCAR/aCAR construct or monocistronic aCAR and iCAR constructs for co-transduction according to claim 45, wherein the iCAR hinge domain component is a CD8 alpha hinge (SEQ ID NO:84).

49. The bicistronic iCAR/aCAR construct or monocistronic aCAR and iCAR constructs for co-transduction according to claim 45, wherein the iCAR hinge domain component is a LIR1 Ig3-4 hinge (SEQ ID NO:87).

50. The bicistronic iCAR/aCAR construct or monocistronic aCAR and iCAR constructs for co-transduction according to claim 45, wherein the iCAR hinge domain component is a LIR1 Ig-4 hinge (SEQ ID NO:88).

51. The bicistronic iCAR/aCAR construct or monocistronic aCAR and iCAR constructs for co-transduction according to claim 45, wherein the iCAR hinge domain component is a LIR1 52 aa hinge (SEQ ID NO:89).

52. The bicistronic iCAR/aCAR construct or monocistronic aCAR and iCAR constructs for co-transduction according to claim 45, wherein the iCAR hinge domain component is a LIR1 36 aa hinge (SEQ ID NO:90).

53. The bicistronic iCAR/aCAR construct or monocistronic aCAR and iCAR constructs for co-transduction according to claim 45, wherein the iCAR hinge domain component is a LIR1 30 aa hinge (SEQ ID NO:91).

54. The bicistronic iCAR/aCAR construct or monocistronic aCAR and iCAR constructs for co-transduction according to claim 45, wherein the iCAR hinge domain component is a LIR1 26 aa hinge (SEQ ID NO:289).

55. The bicistronic iCAR/aCAR construct or monocistronic aCAR and iCAR constructs for co-transduction according to claim 45, wherein the iCAR hinge domain component is a LIR1 8 aa hinge (SEQ ID NO:92).

56. The bicistronic iCAR/aCAR construct or monocistronic aCAR and iCAR constructs for co-transduction according to claim 45, wherein the iCAR hinge domain component is a CD33 hinge (SEQ ID NO:93).

57. The bicistronic iCAR/aCAR construct or monocistronic aCAR and iCAR constructs for co-transduction according to claim 45, wherein the iCAR hinge domain component is a KIR2DL1 hinge (SEQ ID NO:94).

58. The bicistronic iCAR/aCAR construct or monocistronic aCAR and iCAR constructs for co-transduction according to claim 45, wherein the iCAR hinge domain component is a PD-1 (47) hinge (SEQ ID NO:290).

59. The bicistronic iCAR/aCAR construct or monocistronic aCAR and iCAR constructs for co-transduction according to claim 45, wherein the iCAR hinge domain component is a PD-1 (42) hinge (SEQ ID NO:291).

60. The bicistronic iCAR/aCAR construct or monocistronic aCAR and iCAR constructs for co-transduction according to claim 45, wherein the iCAR hinge domain component is a PD-1 (36) hinge (SEQ ID NO:292).

61. The bicistronic iCAR/aCAR construct or monocistronic aCAR and iCAR constructs for co-transduction according to claim 45, wherein the iCAR hinge domain component is a PD-1 (30) hinge (SEQ ID NO:293).

62. The bicistronic iCAR/aCAR construct or monocistronic aCAR and iCAR constructs for co-transduction according to claim 45, wherein the iCAR hinge domain component is a PD-1 (26) hinge (SEQ ID NO:294).

63. The bicistronic iCAR/aCAR construct or monocistronic aCAR and iCAR constructs for co-transduction according to claim 45, wherein the iCAR hinge domain component is a PD-1 (20) hinge (SEQ ID NO:295).

64. The bicistronic iCAR/aCAR construct or monocistronic aCAR and iCAR constructs for co-transduction according to any one of claims 1 to 63, wherein the iCAR TM domain component is selected from a PD-1 TM domain, a CD28 TM domain, a CD8 TM domain (including a CD8a TM domain), a LIR1 TM domain, a CD33 TM domain, and a KIR2DL1 TM domain.

65. The bicistronic iCAR/aCAR construct or monocistronic aCAR and iCAR constructs for co-transduction according to claim 57, wherein the iCAR TM domain component is a PD-1 TM domain (SEQ ID NO:97).

66. The bicistronic iCAR/aCAR construct or monocistronic aCAR and iCAR constructs for co-transduction according to claim 57, wherein the iCAR TM domain component is a CD28 TM domain (SEQ ID NO:96).

67. The bicistronic iCAR/aCAR construct or monocistronic aCAR and iCAR constructs for co-transduction according to claim 57, wherein the iCAR TM domain component is a CD8 alpha TM domain (SEQ ID NO:95).

68. The bicistronic iCAR/aCAR construct or monocistronic aCAR and iCAR constructs for co-transduction according to claim 57, wherein the iCAR TM domain component is a LIR1 TM domain (SEQ ID NO:98).

69. The bicistronic iCAR/aCAR construct or monocistronic aCAR and iCAR constructs for co-transduction according to claim 57, wherein the iCAR TM domain component is a CD33 TM domain (SEQ ID NO:99).

70. The bicistronic iCAR/aCAR construct or monocistronic aCAR and iCAR constructs for co-transduction according to claim 57, wherein the iCAR TM domain component is a KIR2DL1 TM domain (SEQ ID NO:100).

71. The bicistronic iCAR/aCAR construct or monocistronic aCAR and iCAR constructs for co-transduction according to any one of claims 1 to 63, wherein the iCAR inhibitory domain component is an inhibitory domain from a protein selected from the group consisting of PD-1, KIR2DL1, KIR2DL2, KIR2DL3, KIR2DL4, KIR2DL5A, KIR3DL1, KIR3DL2, KIR3DL3, LAIR1, CD22, CD33, SIGLEC5, SIGLEC6, SIGLEC7, SIGLEC8, SIGLEC9, SIGLEC10, SIGLEC11, SIGLEC12, PECAM1/CD31, CD200R1, FCRL1, FCRL2, FCRL3, FCRL4, FCRL5, SLAMF1, SLAMF5, BTLA, LAGS, 2B4, CD160, CEACAM1, TIM3, VISTA, TIGIT, SIRPalpha, FcγRIIB, CD5, CD300a, CD300f, LIR1, LIR2, LIR3, LIR5, LIRE, Ly9, 2xPD1(G4S), 2xPD1(PD1), PVRIg, and AA2AR.

72. The bicistronic iCAR/aCAR construct or monocistronic aCAR and iCAR constructs for co-transduction according to claim 64, wherein the iCAR inhibitory domain component is a PD-1 inhibitory domain (SEQ ID NO:101).

73. The bicistronic iCAR/aCAR construct or monocistronic aCAR and iCAR constructs for co-transduction according to claim 64, wherein the iCAR component is a KIR2DL1 inhibitory domain (SEQ ID NO:102).

74. The bicistronic iCAR/aCAR construct or monocistronic aCAR and iCAR constructs for co-transduction according to claim 64, wherein the iCAR component is a KIR2DL2 inhibitory domain (SEQ ID NO:103).

75. The bicistronic iCAR/aCAR construct or monocistronic aCAR and iCAR constructs for co-transduction according to claim 64, wherein the iCAR component is a KIR2DL3 inhibitory domain (SEQ ID NO:104).

76. The bicistronic iCAR/aCAR construct or monocistronic aCAR and iCAR constructs for co-transduction according to claim 64, wherein the iCAR inhibitory domain component is a KIR2DL4 inhibitory domain (SEQ ID NO:105).

77. The bicistronic iCAR/aCAR construct or monocistronic aCAR and iCAR constructs for co-transduction according to claim 64, wherein the iCAR inhibitory domain component is a KIR2DL5A inhibitory domain (SEQ ID NO:106).

78. The bicistronic iCAR/aCAR construct or monocistronic aCAR and iCAR constructs for co-transduction according to claim 64, wherein the iCAR inhibitory domain component is a KIR3DL1 inhibitory domain (SEQ ID NO:107).

79. The bicistronic iCAR/aCAR construct or monocistronic aCAR and iCAR constructs for co-transduction according to claim 64, wherein the iCAR inhibitory domain component is a KIR3DL2 inhibitory domain (SEQ ID NO:108).

80. The bicistronic iCAR/aCAR construct or monocistronic aCAR and iCAR constructs for co-transduction according to claim 64, wherein the iCAR inhibitory domain component is a KIR3DL3 inhibitory domain (SEQ ID NO:109).

81. The bicistronic iCAR/aCAR construct or monocistronic aCAR and iCAR constructs for co-transduction according to claim 64, wherein the iCAR inhibitory domain component is a LAIR1 inhibitory domain (SEQ ID NO:110).

82. The bicistronic iCAR/aCAR construct or monocistronic aCAR and iCAR constructs for co-transduction according to claim 64, wherein the iCAR inhibitory domain component is a CD22 inhibitory domain (SEQ ID NO:111).

83. The bicistronic iCAR/aCAR construct or monocistronic aCAR and iCAR constructs for co-transduction according to claim 64, wherein the iCAR inhibitory domain component is a CD33 inhibitory domain (SEQ ID NO:112).

84. The bicistronic iCAR/aCAR construct or monocistronic aCAR and iCAR constructs for co-transduction according to claim 64, wherein the iCAR inhibitory domain component is a SIGLEC5 inhibitory domain (SEQ ID NO:113).

85. The bicistronic iCAR/aCAR construct or monocistronic aCAR and iCAR constructs for co-transduction according to claim 64, wherein the iCAR inhibitory domain component is a SIGLEC6 inhibitory domain (SEQ ID NO:114).

86. The bicistronic iCAR/aCAR construct or monocistronic aCAR and iCAR constructs for co-transduction according to claim 64, wherein the iCAR inhibitory domain component is a SIGLEC7 inhibitory domain (SEQ ID NO:115).

87. The bicistronic iCAR/aCAR construct or monocistronic aCAR and iCAR constructs for co-transduction according to claim 64, wherein the iCAR inhibitory domain component is a SIGLEC8 inhibitory domain (SEQ ID NO:116).

88. The bicistronic iCAR/aCAR construct or monocistronic aCAR and iCAR constructs for co-transduction according to claim 64, wherein the iCAR inhibitory domain component is a SIGLEC9 inhibitory domain (SEQ ID NO:117).

89. The bicistronic iCAR/aCAR construct or monocistronic aCAR and iCAR constructs for co-transduction according to claim 64, wherein the iCAR inhibitory domain component is a SIGLEC10inhibitory domain (SEQ ID NO:118).

90. The bicistronic iCAR/aCAR construct or monocistronic aCAR and iCAR constructs for co-transduction according to claim 64, wherein the iCAR inhibitory domain component is a SIGLEC11inhibitory domain (SEQ ID NO:119).

91. The bicistronic iCAR/aCAR construct or monocistronic aCAR and iCAR constructs for co-transduction according to claim 64, wherein the iCAR inhibitory domain component is a SIGLEC12inhibitory domain (SEQ ID NO:120).

92. The bicistronic iCAR/aCAR construct or monocistronic aCAR and iCAR constructs for co-transduction according to claim 64, wherein the iCAR inhibitory domain component is a PECAM1/CD31 inhibitory domain (SEQ ID NO:121).

93. The bicistronic iCAR/aCAR construct or monocistronic aCAR and iCAR constructs for co-transduction according to claim 64, wherein the iCAR inhibitory domain component is a CD200R1inhibitory domain (SEQ ID NO:122).

94. The bicistronic iCAR/aCAR construct or monocistronic aCAR and iCAR constructs for co-transduction according to claim 64, wherein the iCAR inhibitory domain component is a FCRL1inhibitory domain (SEQ ID NO:123).

95. The bicistronic iCAR/aCAR construct or monocistronic aCAR and iCAR constructs for co-transduction according to claim 64, wherein the iCAR inhibitory domain component is a FCRL2inhibitory domain (SEQ ID NO:124).

96. The bicistronic iCAR/aCAR construct or monocistronic aCAR and iCAR constructs for co-transduction according to claim 64, wherein the iCAR inhibitory domain component is a FCRL3inhibitory domain (SEQ ID NO:125).

97. The bicistronic iCAR/aCAR construct or monocistronic aCAR and iCAR constructs for co-transduction according to claim 64, wherein the iCAR inhibitory domain component is a FCRL4 inhibitory domain (SEQ ID NO:126).

98. The bicistronic iCAR/aCAR construct or monocistronic aCAR and iCAR constructs for co-transduction according to claim 64 wherein the iCAR inhibitory domain component is a FCRL5 inhibitory domain (SEQ ID NO:127).

99. The bicistronic iCAR/aCAR construct or monocistronic aCAR and iCAR constructs for co-transduction according to claim 64, wherein the iCAR inhibitory domain component is a SLAMF1 inhibitory domain (SEQ ID NO:128).

100. The bicistronic iCAR/aCAR construct or monocistronic aCAR and iCAR constructs for co-transduction according to claim 64, wherein the iCAR inhibitory domain component is a SLAMF5 inhibitory domain (SEQ ID NO:129).

101. The bicistronic iCAR/aCAR construct or monocistronic aCAR and iCAR constructs for co-transduction according to claim 64, wherein the iCAR inhibitory domain component is a BTLA inhibitory domain (SEQ ID NO:130).

102. The bicistronic iCAR/aCAR construct or monocistronic aCAR and iCAR constructs for co-transduction according to claim 64, wherein the iCAR inhibitory domain component is a LAG3 inhibitory domain (SEQ ID NO:131).

103. The bicistronic iCAR/aCAR construct or monocistronic aCAR and iCAR constructs for co-transduction according to claim 64, wherein the iCAR inhibitory domain component is a 2B4inhibitory domain (SEQ ID NO:132).

104. The bicistronic iCAR/aCAR construct or monocistronic aCAR and iCAR constructs for co-transduction according to claim 64, wherein the iCAR inhibitory domain component is a CD160 inhibitory domain (SEQ ID NO:133).

105. The bicistronic iCAR/aCAR construct or monocistronic aCAR and iCAR constructs for co-transduction according to claim 64, wherein the iCAR inhibitory domain component is a CEACAM1 inhibitory domain (SEQ ID NO:134).

106. The bicistronic iCAR/aCAR construct or monocistronic aCAR and iCAR constructs for co-transduction according to claim 64, wherein the iCAR inhibitory domain component is a TIM3 inhibitory domain (SEQ ID NO:135).

107. The bicistronic iCAR/aCAR construct or monocistronic aCAR and iCAR constructs for co-transduction according to claim 64, wherein the iCAR inhibitory domain component is a VISTA inhibitory domain (SEQ ID NO:136).

108. The bicistronic iCAR/aCAR construct or monocistronic aCAR and iCAR constructs for co-transduction according to claim 64, wherein the iCAR inhibitory domain component is a TIGIT inhibitory domain (SEQ ID NO:137).

109. The bicistronic iCAR/aCAR construct or monocistronic aCAR and iCAR constructs for co-transduction according to claim 64, wherein the iCAR inhibitory domain component is a SIRPalpha inhibitory domain (SEQ ID NO:138).

110. The bicistronic iCAR/aCAR construct or monocistronic aCAR and iCAR constructs for co-transduction according to claim 64, wherein the iCAR inhibitory domain component is a FcγRIIB inhibitory domain (SEQ ID NO:139).

111. The bicistronic iCAR/aCAR construct or monocistronic aCAR and iCAR constructs for co-transduction according to claim 64, wherein the iCAR inhibitory domain component is a CD5 inhibitory domain (SEQ ID NO:140).

112. The bicistronic iCAR/aCAR construct or monocistronic aCAR and iCAR constructs for co-transduction according to claim 64, wherein the iCAR inhibitory domain component is a CD300a inhibitory domain (SEQ ID NO:141).

113. The bicistronic iCAR/aCAR construct or monocistronic aCAR and iCAR constructs for co-transduction according to claim 64, wherein the iCAR inhibitory domain component is a CD300f inhibitory domain (SEQ ID NO:142).

114. The bicistronic iCAR/aCAR construct or monocistronic aCAR and iCAR constructs for co-transduction according to claim 64, wherein the iCAR inhibitory domain component is a LIR1 inhibitory domain (SEQ ID NO:143).

115. The bicistronic iCAR/aCAR construct or monocistronic aCAR and iCAR constructs for co-transduction according to claim 64, wherein the iCAR inhibitory domain component is a LIR2 inhibitory domain (SEQ ID NO:144).

116. The bicistronic iCAR/aCAR construct or monocistronic aCAR and iCAR constructs for co-transduction according to claim 64, wherein the iCAR inhibitory domain component is a LIR3 inhibitory domain (SEQ ID NO:145).

117. The bicistronic iCAR/aCAR construct or monocistronic aCAR and iCAR constructs for co-transduction according to claim 64, wherein the iCAR inhibitory domain component is a LIR5 inhibitory domain (SEQ ID NO:146).

118. The bicistronic iCAR/aCAR construct or monocistronic aCAR and iCAR constructs for co-transduction according to claim 64, wherein the iCAR inhibitory domain component is a LIR8 inhibitory domain (SEQ ID NO:147).

119. The bicistronic iCAR/aCAR construct or monocistronic aCAR and iCAR constructs for co-transduction according to claim 64, wherein the iCAR inhibitory domain component is a Ly9 inhibitory domain (SEQ ID NO:148).

120. The bicistronic iCAR/aCAR construct or monocistronic aCAR and iCAR constructs for co-transduction according to claim 64, wherein the iCAR inhibitory domain component is a 2xPD1(G4S) inhibitory domain (SEQ ID NO:149).

121. The bicistronic iCAR/aCAR construct or monocistronic aCAR and iCAR constructs for co-transduction according to claim 64, wherein the iCAR inhibitory domain component is a 2xPD1(PD1) inhibitory domain (SEQ ID NO:150).

122. The bicistronic iCAR/aCAR construct or monocistronic aCAR and iCAR constructs for co-transduction according to claim 64, wherein the iCAR inhibitory domain component is a PVRIg inhibitory domain (SEQ ID NO:151).

123. The bicistronic iCAR/aCAR construct or monocistronic aCAR and iCAR constructs for co-transduction according to claim 64, wherein the iCAR inhibitory domain component is a AA2AR inhibitory domain (SEQ ID NO:152).

124. The bicistronic iCAR/aCAR construct or monocistronic aCAR and iCAR constructs for co-transduction according to any one of claims 1 to 123, wherein the aCAR single chain variable fragment (scFv) component targets Her2.

125. The bicistronic iCAR/aCAR construct or monocistronic aCAR and iCAR constructs for co-transduction according to any one of claims 1 to 124, wherein the aCAR scFv comprises the Vh and Vl from trastuzumab (SEQ ID NOs:170 and 171, respectively).

126. The bicistronic iCAR/aCAR construct or monocistronic aCAR and iCAR constructs for co-transduction according to claim 125, wherein the aCAR scFv is SEQ ID NO:172.

127. The bicistronic iCAR/aCAR construct or monocistronic aCAR and iCAR constructs for co-transduction according to any one of claims 1 to 124, wherein the aCAR scFv comprises the Vh and Vl from trastuzumab F9G (SEQ ID NOs: 307 and 308).

128. The bicistronic iCAR/aCAR construct or monocistronic aCAR and iCAR constructs for co-transduction according to any one of claims 1 to 124, wherein the aCAR scFv comprises the Vh and Vl from pertuzumab (SEQ ID NOs:173 and 174, respectively).

129. The bicistronic iCAR/aCAR construct or monocistronic aCAR and iCAR constructs for co-transduction according to claim 128, wherein the aCAR scFv is SEQ ID NO:175.

130. The bicistronic iCAR/aCAR construct or monocistronic aCAR and iCAR constructs for co-transduction according to any one of claims 1 to 124, wherein the aCAR scFv comprises the Vh and Vl from FRP5 (SEQ ID NOs:176 and 177, respectively).

131. The bicistronic iCAR/aCAR construct or monocistronic aCAR and iCAR constructs for co-transduction according to any one of claims 1 to 124, wherein the aCAR scFv comprises the Vh and Vl from A21 (SEQ ID NOs:178 and 179, respectively).

132. The bicistronic iCAR/aCAR construct or monocistronic aCAR and iCAR constructs for co-transduction according to any one of claims 1 to 124, wherein the aCAR scFv comprises the Vh and Vl from XMT1517 (SEQ ID NOs:180 and 181, respectively).

133. The bicistronic iCAR/aCAR construct or monocistronic aCAR and iCAR constructs for co-transduction according to any one of claims 1 to 124, wherein the aCAR scFv comprises the Vh and Vl from XMT1518 (SEQ ID NOs:182 and 183, respectively).

134. The bicistronic iCAR/aCAR construct or monocistronic aCAR and iCAR constructs for co-transduction according to any one of claims 1 to 124, wherein the aCAR scFv comprises the Vh and Vl from XMT1519 (SEQ ID NOs:184 and 185, respectively).

135. The bicistronic iCAR/aCAR construct or monocistronic aCAR and iCAR constructs for co-transduction according to any one of claims 1 to 124, wherein the aCAR scFv comprises the Vh and Vl from FWP51 (SEQ ID NOs:186 and 187, respectively).

136. The bicistronic iCAR/aCAR construct or monocistronic aCAR and iCAR constructs for co-transduction according to claim 135, wherein the aCAR scFv comprises SEQ ID NO:188.

137. The bicistronic iCAR/aCAR construct or monocistronic aCAR and iCAR constructs for co-transduction according to any one of claims 1 to 123, wherein the aCAR single chain variable fragment (scFv) component targets EGFR.

138. The bicistronic iCAR/aCAR construct or monocistronic aCAR and iCAR constructs for co-transduction according to any one of claim 1 to 123 or 137, wherein the aCAR scFv comprises the Vh and Vl from cetuximab (SEQ ID NOs:189 and 190, respectively).

139. The bicistronic iCAR/aCAR construct or monocistronic aCAR and iCAR constructs for co-transduction according to any one of claim 1 to 123 or 137, wherein the aCAR scFv is SEQ ID NO:191.

140. The bicistronic iCAR/aCAR construct or monocistronic aCAR and iCAR constructs for co-transduction according to any one of claim 1 to 123 or 137, wherein the aCAR scFv comprises the Vh and Vl from panitumumab (SEQ ID NOs:192 and 193, respectively).

141. The bicistronic iCAR/aCAR construct or monocistronic aCAR and iCAR constructs for co-transduction according to any one of claim 1 to 123 or 137, wherein the aCAR scFv is SEQ ID NO:194.

142. The bicistronic iCAR/aCAR construct or monocistronic aCAR and iCAR constructs for co-transduction according to any one of claim 1 to 123 or 137, wherein the aCAR scFv comprises the Vh and Vl from Imgatuzumab (SEQ ID NOs:195 and 196, respectively).

143. The bicistronic iCAR/aCAR construct or monocistronic aCAR and iCAR constructs for co-transduction according to any one of claim 1 to 123 or 137, wherein the aCAR scFv comprises the Vh and Vl from Nimotuzumab (SEQ ID NOs:197 and 198, respectively).

144. The bicistronic iCAR/aCAR construct or monocistronic aCAR and iCAR constructs for co-transduction according to any one of claim 1 to 123 or 137, wherein the aCAR scFv comprises the Vh and Vl from Nimotuzumab (K5) (SEQ ID NOs:310 and 311, respectively).

145. The bicistronic iCAR/aCAR construct or monocistronic aCAR and iCAR constructs for co-transduction according to any one of claim 1 to 123 or 137, wherein the aCAR scFv comprises the Vh and Vl from Necitumumab (SEQ ID NOs:199 and 200, respectively).

146. The bicistronic iCAR/aCAR construct or monocistronic aCAR and iCAR constructs for co-transduction according to any one of claim 1 to 123 or 137, wherein the aCAR scFv comprises the Vh and Vl from ICR62 (SEQ ID NOs:201 and 202, respectively).

147. The bicistronic iCAR/aCAR construct or monocistronic aCAR and iCAR constructs for co-transduction according to any one of claim 1 to 123 or 137, wherein the aCAR scFv comprises the Vh and Vl from Matuzumab (SEQ ID NOs:204 and 205, respectively).

148. The bicistronic iCAR/aCAR construct or monocistronic aCAR and iCAR constructs for co-transduction according to any one of claim 1 to 123 or 137, wherein the aCAR scFv comprises the Vh and Vl from C10 (SEQ ID NOs:206 and 207, respectively).

149. The bicistronic iCAR/aCAR construct or monocistronic aCAR and iCAR constructs for co-transduction according to any one of claim 1 to 123 or 137, wherein the aCAR scFv comprises the Vh and Vl from Zalutumumab (SEQ ID NOs:208 and 209, respectively).

150. The bicistronic iCAR/aCAR construct or monocistronic aCAR and iCAR constructs for co-transduction according to any one of claim 1 to 123 or 137, wherein the aCAR scFv comprises the Vh and Vl from P1X (SEQ ID NOs:210 and 211, respectively).

151. The bicistronic iCAR/aCAR construct or monocistronic aCAR and iCAR constructs for co-transduction according to any one of claim 1 to 123 or 137, wherein the aCAR scFv comprises the Vh and Vl from P2X (SEQ ID NOs:212 and 213, respectively).

152. The bicistronic iCAR/aCAR construct or monocistronic aCAR and iCAR constructs for co-transduction according to any one of claim 1 to 123 or 137, wherein the aCAR scFv comprises the Vh and Vl from P3X (SEQ ID NOs:214 and 215, respectively).

153. The bicistronic iCAR/aCAR construct or monocistronic aCAR and iCAR constructs for co-transduction according to any one of claim 1 to 123 or 137, wherein the aCAR scFv comprises the VH from EGFR-1a1-VHH (SEQ ID NO:216).

154. The bicistronic iCAR/aCAR construct or monocistronic aCAR and iCAR constructs for co-transduction according to any one of claim 1 to 123 or 137, wherein the aCAR scFv comprises the VH from EGFR-VHH (SEQ ID NO:312).

155. The bicistronic iCAR/aCAR construct or monocistronic aCAR and iCAR constructs for co-transduction according to any one of claims 1 to 123, wherein the aCAR single chain variable fragment (scFv) component targets Mesothelin.

156. The bicistronic iCAR/aCAR construct or monocistronic aCAR and iCAR constructs for co-transduction according to any one of claim 1 to 123 or 155, wherein the aCAR scFv comprise the Vh and Vl from Amatuximab (SEQ ID NOs:217 and 218, respectively).

157. The bicistronic iCAR/aCAR construct or monocistronic aCAR and iCAR constructs for co-transduction according to any one of claim 1 to 123 or 155, wherein the aCAR scFv comprise the Vh and Vl from P4 (SEQ ID NOs:219 and 220, respectively).

158. The bicistronic iCAR/aCAR construct or monocistronic aCAR and iCAR constructs for co-transduction according to any one of claim 1 to 123 or 155, wherein the aCAR scFv comprise the Vh and Vl from SS1 (SEQ ID NOs:222 and 223, respectively).

159. The bicistronic iCAR/aCAR construct or monocistronic aCAR and iCAR constructs for co-transduction according to any one of claim 1 to 123 or 155, wherein the aCAR scFv comprise the VHH from SD1 (SEQ ID NO:225).

160. The bicistronic iCAR/aCAR construct or monocistronic aCAR and iCAR constructs for co-transduction according to any one of claim 1 to 123 or 155, wherein the aCAR scFv comprise the VHH from SD2 (SEQ ID NO:226).

161. The bicistronic iCAR/aCAR construct or monocistronic aCAR and iCAR constructs for co-transduction according to any one of claim 1 to 123 or 155, wherein the aCAR scFv comprise the Vh and Vl from 1H7 (SEQ ID NOs:227 and 228, respectively).

162. The bicistronic iCAR/aCAR construct or monocistronic aCAR and iCAR constructs for co-transduction according to any one of claim 1 to 123 or 155, wherein the aCAR scFv comprise the Vh and Vl from 3C02 (SEQ ID NOs:230 and 231, respectively).

163. The bicistronic iCAR/aCAR construct or monocistronic aCAR and iCAR constructs for co-transduction according to any one of claims 1 to 162, wherein the hinge TM domain component is selected from the group consisting of a CD28 hinge and a CD8 hinge (including a CD8a hinge domain).

164. The bicistronic iCAR/aCAR construct or monocistronic aCAR and iCAR constructs for co-transduction according to claim 163, wherein the hinge TM domain component is a CD28 hinge domain (SEQ ID NO:85).

165. The bicistronic iCAR/aCAR construct or monocistronic aCAR and iCAR constructs for co-transduction according to claim 163, wherein the hinge TM domain component is a CD8 alpha hinge domain (SEQ ID NO:84).

166. The bicistronic iCAR/aCAR construct or monocistronic aCAR and iCAR constructs for co-transduction according to any one of claims 1 to 165, wherein the co-stimulatory domain component is selected from the group consisting of a CD137 (4-1BB) co-stimulatory domain, a CD28 co-stimulatory domain, a 28BB co-stimulatory domain, and a CD3z co-stimulatory domain.

167. The bicistronic iCAR/aCAR construct or monocistronic aCAR and iCAR constructs for co-transduction according to claim 166, wherein the co-stimulatory domain component is a CD137 (4-1BB) co-stimulatory domain (SEQ ID NO:233).

168. The bicistronic iCAR/aCAR construct or monocistronic aCAR and iCAR constructs for co-transduction according to claim 166, wherein the co-stimulatory domain component is a CD28 co-stimulatory domain (SEQ ID NO:234).

169. The bicistronic iCAR/aCAR construct or monocistronic aCAR and iCAR constructs for co-transduction according to claim 166, wherein the co-stimulatory domain component a CD3z activation signaling domain (SEQ ID NO:235).

170. The bicistronic iCAR/aCAR construct or monocistronic aCAR and iCAR constructs for co-transduction according to any one of claims 1 to 169, wherein the ITAM is a CD3 zeta domain.

171. The bicistronic iCAR/aCAR construct or monocistronic aCAR and iCAR constructs for co-transduction according to claim 170, wherein the ITAM is a CD3 zeta domain (SEQ ID NO:236).

172. The bicistronic iCAR/aCAR construct or monocistronic aCAR and iCAR constructs for co-transduction according to claim 170, wherein the ITAM is a CD3 zeta 3F domain (SEQ ID NO:237).

173. The bicistronic iCAR/aCAR construct or monocistronic aCAR and iCAR constructs for co-transduction according to claims 1 to 172, wherein the ITAM is a CD3 zeta 4F domain (SEQ ID NO:238).

174. The bicistronic iCAR/aCAR construct or monocistronic aCAR and iCAR constructs for co-transduction according to claim 170, wherein the ITAM is a CD3 zeta 4OF domain (SEQ ID NO:239).

175. The bicistronic iCAR/aCAR construct or monocistronic aCAR and iCAR constructs for co-transduction according to any one of claims 1 to 174, wherein the linker connecting the iCAR portion and the aCAR portion comprises one or more linker selected from the group consisting of T2A (SEQ ID NO:155), F2A (SEQ ID NO:156), P2A (SEQ ID NO:157), E2A (SEQ ID NO:158), and an IRES sequence (SEQ ID NO:159 or 160).

176. The bicistronic iCAR/aCAR construct or monocistronic aCAR and iCAR constructs for co-transduction according to any one of claims 1 to 175, wherein the linker connecting the iCAR portion and the aCAR portion is GSG T2A (SEQ ID NO:155).

177. The bicistronic iCAR/aCAR construct or monocistronic aCAR and iCAR constructs for co-transduction according to any one of claims 1 to 176, wherein the bicistronic iCAR/aCAR construct comprises an amino acid sequence encoded by a nucleic acid sequence selected from the group consisting of SEQ ID NO:1, SEQ ID NO:3, SEQ ID NO:5, SEQ ID NO:7, SEQ ID NO:9, SEQ ID NO:11, SEQ ID NO:13, SEQ ID NO:15, SEQ ID NO:17, SEQ ID NO:19, SEQ ID NO:21, SEQ ID NO:23, SEQ ID NO:25, SEQ ID NO:27, SEQ ID NO:29, SEQ ID NO:31, SEQ ID NO:33, SEQ ID NO:35, SEQ ID NO:275, SEQ ID NO:277, SEQ ID NO:279, SEQ ID NO:281, SEQ ID NO:321, SEQ ID NO:323, and SEQ ID NO:325.

178. The bicistronic iCAR/aCAR construct or monocistronic aCAR and iCAR constructs for co-transduction according to any one of claims 1 to 176, wherein the bicistronic iCAR/aCAR construct comprises an amino acid sequence encoded by a nucleic acid sequence selected from the group consisting of SEQ ID NO:275, SEQ ID NO:277, SEQ ID NO:279, SEQ ID NO:281, SEQ ID NO:321, SEQ ID NO:323, and SEQ ID NO:325.

179. The bicistronic iCAR/aCAR construct or monocistronic aCAR and iCAR constructs for co-transduction according to any one of claims 1 to 177, wherein the bicistronic iCAR/aCAR construct comprises an amino acid sequence selected from the group consisting of SEQ ID NO:2, SEQ ID NO:4, SEQ ID NO:6, SEQ ID NO:8, SEQ ID NO:10, SEQ ID NO:12, SEQ ID NO:14, SEQ ID NO:16, SEQ ID NO:18, SEQ ID NO:20, SEQ ID NO:22, SEQ ID NO:24, SEQ ID NO:26, SEQ ID NO:28, SEQ ID NO:30, SEQ ID NO:32, SEQ ID NO:34, SEQ ID NO:36, SEQ ID NO:276, SEQ ID NO:278, SEQ ID NO:280, SEQ ID NO:282, SEQ ID NO:322, SEQ ID NO:324, and SEQ ID NO:326.

180. The bicistronic iCAR/aCAR construct or monocistronic aCAR and iCAR constructs for co-transduction according to any one of claims 1 to 177, wherein the bicistronic iCAR/aCAR construct comprises an amino acid sequence selected from the group consisting of SEQ ID NO:276, SEQ ID NO:278, SEQ ID NO:280, SEQ ID NO:282, SEQ ID NO:322, SEQ ID NO:324, and SEQ ID NO:326.

181. The bicistronic iCAR/aCAR construct or monocistronic aCAR and iCAR constructs for co-transduction according any of the preceding claims, wherein the bicistronic iCAR/aCAR construct further comprises a short hairpin RNA (shRNA).

182. The bicistronic iCAR/aCAR construct or monocistronic aCAR and iCAR constructs for co-transduction according any of the preceding claims, wherein the iCAR comprises a synthetic PD-1 or LIR1 sequence as shown in Table 8, including one selected from the group consisting of SEQ ID NO:243, SEQ ID NO:244, SEQ ID NO:245, SEQ ID NO:246, SEQ ID NO:247, SEQ ID NO:248, SEQ ID NO:249, SEQ ID NO:250, SEQ ID NO:251, SEQ ID NO:252, SEQ ID NO:253, SEQ ID NO:254, SEQ ID NO:296, SEQ ID NO:297, SEQ ID NO:298, SEQ ID NO:299, SEQ ID NO:300, SEQ ID NO:301, SEQ ID NO:302, and SEQ ID NO:304.

183. The bicistronic iCAR/aCAR construct or monocistronic aCAR and iCAR constructs for co-transduction according any of the preceding claims, wherein the iCAR/aCAR comprises a construct as described in Table 1.

184. The bicistronic iCAR/aCAR construct or monocistronic aCAR and iCAR constructs for co-transduction according any of the preceding claims, wherein the iCAR/aCAR comprises a nucleic acid sequence as described in Table 1, including SEQ ID NO:1, SEQ ID NO:3, SEQ ID NO:5, SEQ ID NO:7, SEQ ID NO:9, SEQ ID NO:11, SEQ ID NO:13, SEQ ID NO:15, SEQ ID NO:17, SEQ ID NO:19, SEQ ID NO:21, SEQ ID NO:23, SEQ ID NO:25, SEQ ID NO:27, SEQ ID NO:29, SEQ ID NO:31, SEQ ID NO:33, SEQ ID NO:35, SEQ ID NO:275, SEQ ID NO:277, SEQ ID NO:279, SEQ ID NO:281, SEQ ID NO:321, SEQ ID NO:323, and SEQ ID NO:325.

185. The bicistronic iCAR/aCAR construct or monocistronic aCAR and iCAR constructs for co-transduction according any of the preceding claims, wherein the iCAR/aCAR comprises an amino acid sequence as described in Table 1, including SEQ ID NO:2, SEQ ID NO:4, SEQ ID NO:6, SEQ ID NO:8, SEQ ID NO:10, SEQ ID NO:12, SEQ ID NO:14, SEQ ID NO:16, SEQ ID NO:18, SEQ ID NO:20, SEQ ID NO:22, SEQ ID NO:24, SEQ ID NO:26, SEQ ID NO:28, SEQ ID NO:30, SEQ ID NO:32, SEQ ID NO:34, SEQ ID NO:36, SEQ ID NO:276, SEQ ID NO:278, SEQ ID NO:280, SEQ ID NO:282, SEQ ID NO:322, SEQ ID NO:324, and SEQ ID NO:326.

186. The bicistronic iCAR/aCAR construct or monocistronic aCAR and iCAR constructs for co-transduction according any of the preceding claims, wherein the iCAR comprises an amino acid sequence selected from the group consisting of SEQ ID NO: 255, SEQ ID NO:256, SEQ ID NO:257, SEQ ID NO:258, SEQ ID NO:305, SEQ ID NO:259, SEQ ID NO:260, SEQ ID NO:261, SEQ ID NO:262, SEQ ID NO:263, SEQ ID NO:264, SEQ ID NO:265, SEQ ID NO:266, SEQ ID NO:267, SEQ ID NO:268, SEQ ID NO:269, SEQ ID NO:270, SEQ ID NO:271, SEQ ID NO:272, SEQ ID NO:327, SEQ ID NO:328, SEQ ID NO:329, SEQ ID NO:330, SEQ ID NO:331, SEQ ID NO:332, SEQ ID NO:333, and SEQ ID NO:334.

187. The bicistronic iCAR/aCAR construct or monocistronic aCAR and iCAR constructs for co-transduction according any of the preceding claims, wherein the iCAR/aCAR comprises a construct as described in Table 1, Table 11 and/or Table 12.

188. The bicistronic iCAR/aCAR construct or monocistronic aCAR and iCAR constructs for co-transduction according any of the preceding claims, wherein the iCAR/aCAR comprises a construct or portion thereof as described in any one of Tables 1 to 22.

189. The bicistronic iCAR/aCAR construct or monocistronic aCAR and iCAR constructs for co-transduction according any of the preceding claims, wherein the aCAR comprises a construct as described in any one of Tables 15, 16, 17, and/or 21.

190. The bicistronic iCAR/aCAR construct or monocistronic aCAR and iCAR constructs for co-transduction according any of the preceding claims, wherein the iCAR comprises a construct as described in any one of Tables 1, 2, 4, 9, 10, 11 and/or 12.

191. A nucleic acid composition comprising a nucleic acid that encodes a bicistronic iCAR/aCAR construct or monocistronic aCAR and iCAR constructs for co-transduction according to any one of the preceding claims.

192. A vector comprising a nucleic acid sequence encoding for a bicistronic iCAR/aCAR construct or monocistronic aCAR and iCAR constructs for co-transduction according to any one of the preceding claims.

193. A vector composition comprising the vector according to claim 188.

194. The nucleic acid or vector according to claims 187 to 189, wherein the iCAR/aCAR construct or monocistronic aCAR and iCAR constructs for co-transduction comprises a signal peptide upstream of the iCAR and/or aCAR portions.

195. The nucleic acid or vector according to claim 190, wherein the signal peptide is a CD8 alpha signal peptide (SEQ ID NO: 161), a GM-CSF signal peptide (SEQ ID NO: 162), or a mIgK signal peptide (SEQ ID NO: 306).

196. A safe effector cell comprising a nucleic acid or nucleic acid sequence composition according to claim 187.

197. A safe effector cell comprising a vector or vector composition of according to claim 188 or 189.

198. A safe effector immune cell expressing a bicistronic iCAR/aCAR construct or monocistronic aCAR and iCAR constructs for co-transduction according to any one of the preceding claims.

199. A method for treating cancer in a patient having a tumor characterized by LOH, comprising administering to the patient a safe effector immune cell according to any one of claims 192 to 194.

200. A method for treating cancer in a patient having a tumor characterized by a genetic mutation resulting in a complete loss of expression of a target gene or target extracellular polymorphic epitope gene, comprising administering to the patient a safe effector immune cell according to any one of claims 192 to 194.

201. A method for treating cancer in a patient having a tumor characterized by loss of heterozygosity (LOH), or other genetic loss or allelic imbalance phenotypes including, without limitation, loss of function or expression, resulting from mutations affecting one or more nucleotides, comprising administering to the patient a safe effector immune cell according to any one of claims 188 to 190.

202. The method of claim 193, wherein the cancer is selected from the group consisting of Acute Myeloid Leukemia [LAML], Adrenocortical carcinoma [ACC], Bladder Urothelial Carcinoma [BLCA], Brain Lower Grade Glioma [LGG], Breast invasive carcinoma [BRCA], Cervical squamous cell carcinoma and endocervical adenocarcinoma [CESC], Cholangiocarcinoma [CHOL], Colon adenocarcinoma [COAD], Esophageal carcinoma [ESCA], Glioblastoma multiforme [GBM], Head and Neck squamous cell carcinoma [HNSC], Kidney Chromophobe [KICH], Kidney renal clear cell carcinoma [KIRC], Kidney renal papillary cell carcinoma [KIRP], Liver hepatocellular carcinoma [LIHC], Lung adenocarcinoma [LUAD], Lung squamous cell carcinoma [LUSC], Lymphoid Neoplasm Diffuse Large B-cell Lymphoma [DLBC], Mesothelioma [MESO], Ovarian serous cystadenocarcinoma [OV], Pancreatic adenocarcinoma [PAAD], Pheochromocytoma and Paraganglioma [PCPG], Prostate adenocarcinoma [PRAD], Rectum adenocarcinoma [READ], Sarcoma [SARC], Skin Cutaneous Melanoma [SKCM], Stomach adenocarcinoma [STAD], Testicular Germ Cell Tumors [TGCT], Thymoma [THYM], Thyroid carcinoma [THCA], Uterine Carcinosarcoma [UCS], Uterine Corpus Endometrial Carcinoma [UCEC], Uveal Melanoma [UVM], Non-small cell lung carcinoma [NSCLC], and Small cell lung cancer [SCLC].
